(19) United States
(12) Patent Application Publication
(10) Pub. No.: US 2004/0043389 A1
(43) Pub. Date: Mar. 4, 2004

(54) Methods and compositions for identifying risk factors for abnormal lipid levels and the diseases and disorders associated therewith

(75) Inventor: Jeanette McCarthy, San Diego, CA (US)

Correspondence Address: MILLENNIUM PHARMACEUTICALS, INC., 40 Landsdowne Street, CAMBRIDGE, MA, 02139, US

(73) Assignee: Vitivity, Inc., Cambridge, MA

(21) Appl. No.: 10/235,192

(22) Filed: Sep. 4, 2002

(51) Int. Cl. C12Q 1/68

(52) U.S. Cl. 435/6

(57) ABSTRACT

The present invention is based at least in part on the discovery of associations between polymorphic regions and specific diseases or disorders, e.g., abnormal lipid levels, e.g., abnormally low HDL-C levels, or diseases or disorders associated with abnormal lipid levels, e.g., vascular or metabolic diseases or disorders. Accordingly, the invention provides nucleic acid molecules having a nucleotide sequence of an allelic variant of a gene listed in Tables 1-5. The invention also provides methods for identifying specific alleles of polymorphic regions of a gene listed in Tables 1-5, methods for determining whether a subject has or is at risk of developing a disease which is associated with a specific allele of a polymorphic region of a gene listed in Tables 1-5, e.g., abnormal lipid levels, e.g., abnormally low HDL-C levels, or a vascular or metabolic disease or disorder, based on detection of one or more polymorphisms within the genes listed in Tables 1-5, and kits for performing such methods. The invention further provides methods for identifying a subject who has, or is at risk for developing, abnormal lipid levels, e.g., abnormally low HDL-C levels, or a vascular or metabolic disease or disorder, as a candidate for a particular clinical course of therapy or a particular diagnostic evaluation.

### BACKGROUND OF THE INVENTION

[0001] Coronary heart disease is a major health risk throughout the industrialized world. Coronary Artery Disease (CAD), or atherosclerosis, the most prevalent of cardiovascular diseases, is the principal cause of heart attack, stroke, and gangrene of the extremities, and thereby the principle cause of death in the United States. CAD involves the progressional narrowing of the arteries due to a build-up of atherosclerotic plaque. Myocardial infarction (MI), e.g., heart attack, results when the heart is damaged due to reduced blood flow to the heart caused by the build-up of plaque in the coronary arteries.

[0002] CAD is a complex disease involving many cell types and molecular factors (described in, for example, Ross, 1993, Nature 362: 801-809). The process, in normal circumstances a protective response to insults to the endothelium and smooth muscle cells (SMCs) of the wall of the artery, consists of the formation of fibrofatty and fibrous lesions or plaques, preceded and accompanied by inflammation. The advanced lesions of atherosclerosis may occlude the artery concerned, and result from an excessive inflammatory-fibroproliferative response to numerous different forms of insult. Injury or dysfunction of the vascular endothelium is a common feature of many conditions that predispose a subject to accelerated development of atherosclerotic cardiovascular disease. For example, shear stresses are thought to be responsible for the frequent occurrence of atherosclerotic plaques in regions of the circulatory system where turbulent blood flow occurs, such as branch points and irregular structures.

[0003] The first observable event in the formation of an atherosclerotic plaque occurs when blood-borne monocytes adhere to the vascular endothelial layer and transmigrate through to the sub-endothelial space. Adjacent endothelial cells at the same time produce oxidized low density lipoprotein (LDL). These oxidized LDLs are then taken up in large amounts by the monocytes through scavenger receptors expressed on their surfaces. In contrast to the regulated pathway by which native LDL (nLDL) is taken up by nLDL specific receptors, the scavenger pathway of uptake is not regulated by the monocytes.

[0004] These lipid-filled monocytes are called foam cells, and are the major constituent of the fatty streak. Interactions between foam cells and the endothelial and SMCs which surround them lead to a state of chronic local inflammation which can eventually lead to smooth muscle cell proliferation and migration, and the formation of a fibrous plaque.

[0005] Such plaques occlude the blood vessel concerned and, thus, restrict the flow of blood, resulting in ischemia. Ischemia is a condition characterized by a lack of oxygen supply in tissues of organs due to inadequate perfusion. Such inadequate perfusion can have a number of natural causes, including atherosclerotic or restenotic lesions, anemia, or stroke. Many medical interventions, such as the interruption of the flow of blood during bypass surgery, for example, also lead to ischemia. In addition to sometimes being caused by diseased cardiovascular tissue, ischemia may sometimes affect cardiovascular tissue, such as in ischemic heart disease.

[0006] Dyslipidemia is associated with the development of CAD and atherosclerosis. Although historically much emphasis has been placed on total plasma cholesterol levels as a risk factor for coronary heart disease, it has been clearly established that low levels of high density lipoprotein cholesterol (HDL) is an independent risk factor for this disease. Family and twin studies have shown that there are genetic components that affect HDL levels. However, mutations in the main protein components of HDL (ApoA1 and ApoAII) and in the enzymes that are known to be involved in HDL metabolism (e.g., CETP, HL, LPL and LCAT) do not explain all of the genetic factors affecting HDL levels in the general population (J. L. Breslow, in The Metabolic and Molecular Bases of Inherited Disease, C. R. Scriver, A. L. Beaudet, W. Sly, D. Valle, Eds. (McGraw-Hill, New York, 1995), pp 2031-2052; and S. M. Grundy, (1995) J. Am. Med. Assoc. 256: 2849). This finding in combination with the fact that the mechanisms of HDL metabolism are poorly understood, suggests that there are other as yet unknown factors that contribute to the genetic variability of lipid levels, including HDL levels.

[0007] It would thus be beneficial to identify polymorphic regions within genes which are associated with abnormal lipid levels, e.g., low HDL levels. It would further be desirable to provide prognostic, diagnostic, pharmacogenomic, and therapeutic methods utilizing the identified polymorphic regions.

### SUMMARY OF THE INVENTION

[0008] The present invention is based, at least in part, on the identification of polymorphic regions within several genes which are associated with abnormal lipid levels, e.g., low HDL-C levels (see Tables 1-5, below). Decreased HDL-C level is a well-known risk factor for the development of vascular diseases and disorders, e.g., CAD and MI, and metabolic diseases or disorders, e.g., diabetes or obesity. Accordingly, SNPs in the genes listed in Table 1 can be utilized to predict, in a subject, an increased risk for developing abnormal lipid levels, e.g., low HDL-C levels, or a disease or disorder associated with abnormal lipid levels, e.g., a vascular disease or disorder, e.g., CAD or MI, or a metabolic disease or disorder, e.g., diabetes or obesity. In particular, a subject having a specific allele listed in Table 5 is at an increased risk of having or developing abnormal lipid levels, e.g., low HDL-C levels, or a disease or disorder associated with abnormal lipid levels, e.g., a vascular or metabolic disease or disorder.

[0009] Furthermore, the associations between the allelic variants of the genes listed in Tables 1-5 and low HDL-C level are influenced by gender, indicating an interaction with hormonal status. The association of lipids with allelic variants in genes listed in Tables 1-5, is modulated by hormonal status. Therefore, these polymorphisms may be useful in predicting the effect of hormone replacement therapy (HRT) on lipid levels in female subjects, e.g., postmenopausal female subjects, and therefore the risk for developing a vascular or metabolic disease or disorder.

[0010] Thus, the invention relates to polymorphic regions and in particular, SNPs identified as described herein, in combination with each other or in combination with other polymorphisms in the genes listed in Tables 1-5, or in other genes. The invention also relates to the use of these SNPs, and other SNPs in the genes listed in Tables 1-5, or in other genes, particularly those in linkage disequilibrium with these SNPs, for diagnosis of abnormal lipid levels, e.g., abnormally low HDL-C level, or a disease or disorder associated with abnormal lipid levels, e.g., a vascular or metabolic disease or disorder. The SNPs identified herein may further be used in the development of new treatments for abnormal lipid levels, e.g., abnormally low HDL-C level, or a disease or disorder associated with abnormal lipid levels, e.g., a vascular or metabolic disease or disorder, based upon comparison of the variant and normal versions of the gene or gene product (e.g., the reference sequence), and development of cell-culture based and animal models for research and treatment of vascular diseases or disorders or metabolic diseases or disorders. The invention further relates to novel compounds and pharmaceutical compositions for use in the diagnosis and treatment of such disorders. In preferred embodiments, the vascular disease is CAD or MI, and the metabolic disease is obesity or diabetes.

[0011] The polymorphisms of the invention may thus be used, in combination with each other or with polymorphisms in the genes listed in Tables 1-5, or in other genes, in prognostic, diagnostic, and therapeutic methods. For example, the polymorphisms of the invention can be used to determine whether a subject has, or is, or is not at risk of developing a disease or disorder associated with a specific allelic variant of a polymorphic region of a gene listed in Tables 1-5, e.g., a disease or disorder associated with aberrant gene expression or protein activity, e.g., abnormal lipid levels, e.g., abnormally low HDL-C level, or a disease or disorder associated with abnormal lipid levels, e.g., a vascular or metabolic disease or disorder.

[0012] The invention further provides methods for determining at least a portion of a gene listed in Tables 1-5. In a preferred embodiment, the method comprises contacting a sample nucleic acid comprising the sequence of a gene listed in Tables 1-5 with a probe or primer having a sequence which is complementary to the sequence of a gene listed in Tables 1-5, carrying out a reaction that would amplify and/or detect differences in a region of interest within the sequence of a gene listed in Tables 1-5, and comparing the results of each reaction with that of a reaction with a control (known) gene (e.g., a gene listed in Tables 1-5 from a human not afflicted with abnormal lipid levels, e.g., low HDL-C levels, vascular disease or disorder e.g., CAD, MI, or a metabolic disease or disorder, e.g., obesity or diabetes) so as to determine the molecular structure of the gene sequence of a gene listed in Tables 1-5 in the sample nucleic acid. The method of the invention can be used for example in determining the molecular structure of at least a portion of an exon, an intron, a 5′ upstream regulatory element, or the 3′ untranslated region.

[0013] In another preferred embodiment, the method comprises determining the nucleotide content of at least a portion of a gene listed in Tables 1-5, such as by sequence analysis. In yet another embodiment, determining the molecular structure of at least a portion of a gene listed in Tables 1-5 is carried out by single-stranded conformation polymorphism (SSCP). In yet another embodiment, the method is an oligonucleotide ligation assay (OLA). Other methods within the scope of the invention for determining the molecular structure of at least a portion of a gene listed in Tables 1-5 include hybridization of allele-specific oligonucleotides, sequence specific amplification, primer specific extension, and denaturing high performance liquid chromatography (DHPLC). In at least some of the methods of the invention, the probe or primer is allele specific. Preferred probes or primers are single stranded nucleic acids, which optionally are labeled.

[0014] The methods of the invention can be used for determining the identity of a nucleotide or amino acid residue within a polymorphic region of a human gene listed in Tables 1-5 present in a subject. For example, the methods of the invention can be useful for determining whether a subject has, or is or is not at risk of developing abnormal lipid levels, e.g., abnormally low HDL-C level, or a disease or disorder associated with abnormal lipid levels, e.g., a vascular or metabolic disease or disorder.

[0015] In one embodiment, the disease or condition is characterized by aberrant protein activity, such as aberrant protein level, which can result from aberrant expression of a gene listed in Tables 1-5. Accordingly, the invention provides methods for predicting abnormal lipid levels, e.g., abnormally low HDL-C level.

[0016] The invention also provides a method of identifying subjects which are at increased risk of developing abnormal lipid levels, e.g., abnormally low HDL-C level, or a disease or disorder associated with abnormal lipid levels, e.g., a vascular or metabolic disease or disorder, wherein the method comprises the steps of i) identifying in DNA from a subject at least one sequence polymorphism, as compared with the reference sequence, in a gene listed in Tables 1-5; and ii) identifying the subject based on the identified polymorphism.

[0017] In another embodiment, the invention provides a kit for amplifying and/or for determining the molecular structure of at least a portion of a gene listed in Tables 1-5, comprising a probe or primer capable of hybridizing to a gene listed in Tables 1-5 and instructions for use. In a preferred embodiment, determining the molecular structure of a region of a gene listed in Tables 1-5 comprises determining the identity of the allelic variant of the polymorphic region. Determining the molecular structure of at least a portion of a gene listed in Tables 1-5 can comprise determining the identity of at least one nucleotide or determining the nucleotide composition, e.g., the nucleotide sequence of a gene listed in Tables 1-5.

[0018] A kit of the invention can be used, e.g., for determining whether a subject is or is not at risk of developing a disease associated with a specific allelic variant of a polymorphic region of a gene listed in Tables 1-5. In a preferred embodiment, the invention provides a kit for determining whether a subject is or is not at risk of developing abnormal lipid levels, e.g., abnormally low HDL-C level, or a disease or disorder associated with abnormal lipid levels, e.g., a vascular or metabolic disease or disorder. The kit of the invention can also be used in selecting the appropriate clinical course of treatment for a subject. Thus, determining the allelic variants of polymorphic regions within a gene listed in Tables 1-5 in a subject can be useful in predicting how a subject will respond to a specific drug, e.g., a drug for treating a disease or disorder associated with a polymorphism of a gene listed in Tables 1-5, e.g., abnormal lipid levels, e.g., abnormally low HDL-C level, or a disease or disorder associated with abnormal lipid levels, e.g., a vascular or metabolic disease or disorder.

[0019] In a further embodiment, the invention provides a method for treating a subject having a disease or condition associated with a specific allelic variant of a polymorphic region of a gene listed in Tables 1-5. In one embodiment, the method comprises the steps of (a) determining the identity of the allelic variant; and (b) administering to the subject a clinical course of therapy that compensates for the effect of the specific allelic variant e.g., treatment with medications, lifestyle changes, and any combination thereof. In one embodiment, the clinical course of therapy is administration of an agent or modulator which modulates, e.g., agonizes or antagonizes, nucleic acid expression or protein levels. In a preferred embodiment, the modulator is selected from the group consisting of a nucleic acid, a ribozyme, an antisense nucleic acid molecule, a protein or polypeptide, an antibody, a peptidomimetic, or a small molecule.

[0020] In a preferred embodiment, the specific allelic variant is a mutation. The mutation can be located, e.g., in a 5′ upstream regulatory element, a 3′ regulatory element, an intron, or an exon of the gene.

[0021] Additionally, the invention provides a method of identifying a subject who is susceptible to abnormal lipid levels, e.g., abnormally low HDL-C level, which method comprises the steps of i) providing a nucleic acid sample from a subject; and ii) detecting in the nucleic acid sample one or more allelic variants of a gene listed in Tables 1-5 which correlate with the vascular disorder with a P value less than or equal to 0.05, the existence of the polymorphism being indicative of susceptibility to abnormal lipid levels, e.g., abnormally low HDL-C level.

[0022] In another aspect, the invention provides methods for predicting the effect of hormone replacement therapy (HRT) on the HDL-C level in a female subject, e.g., a postmenopausal female subject, comprising identifying one or more allelic variants of a gene listed in Tables 1-5 which are associated with abnormally low HDL-C level in females, thereby predicting the effect of hormone replacement therapy on the HDL-C level in the subject. In particular, the presence of AT3_{—}1 AG or AA, F2_{—}1 TT, ITGB3_{—}4 TC, LIPC_{—}1 AG or AA, LRP1_{—}1 GT or TT, PPARG_{—}1 CC, PRCP_{—}1 CC, THBS4_{—}1 GG or GC, or the complements thereof, indicates the effect of hormone replacement therapy in a female subject to be a decrease in HDL-C level. The presence of COL5A2_{—}1 GG, CD14_{—}1 CT, VWF_{—}2 AG, and ITGB3_{—}4 TC, in combination, or the complements thereof, also indicate the effect of hormone replacement therapy in a female subject to be a decrease in HDL-C level.

[0023] The invention further provides forensic methods based on detection of polymorphisms within the genes listed in Tables 1-5.

[0024] Other features and advantages of the invention will be apparent from the following detailed description and claims.

### DETAILED DESCRIPTION OF THE INVENTION

[0025] The present invention is based, at least in part, on the identification of polymorphic regions within several genes which are associated with abnormal lipoprotein levels, e.g., low HDL-C levels (see Tables 1-5, below). Decreased HDL-C levels is a well-known risk factor for the development of vascular diseases and disorders, e.g., CAD and MI and metabolic diseases and disorders, e.g. diabetes and obesity. Accordingly, SNPs in these genes, as identified herein, can be utilized to predict the risk, in a subject, of developing abnormal lipid levels, e.g., abnormally low HDL-C level, or a disease or disorder associated with abnormal lipid levels, e.g., a vascular or metabolic disease or disorder. In particular, a subject having a specific allele listed in Table 5 is at an increased risk of having or developing abnormal lipid levels, e.g., low HDL-C levels, or a disease or disorder associated with abnormal lipid levels, e.g., a vascular or metabolic disease or disorder.

[0026] Furthermore, these polymorphisms may be useful in predicting the effect of hormone replacement therapy (HRT) on lipid levels in female subjects, e.g., postmenopausal female subjects, and therefore the risk for developing a vascular or metabolic disease or disorder.

[0027] Table 1, below, lists the SNPs which are associated with HDL-C levels, and comprises the SNPs set forth in Tables 2, 3, 4 and 5. Table 2 lists SNPs which are associated with HDL-C level in both male and female subjects. Table 3 lists gender specific SNPs which are associated with HDL-C in either males or females. The present invention also includes those polymorphisms in LD with the SNPs in Tables 2 and 3, as shown, for example, in Table 4. Table 5 lists the specific alleles of the SNPs listed in Tables 2, 3, and 4 which indicate that a subject is more likely to have, develop, or be at a higher than normal risk of developing abnormal lipid levels, e.g., low HDL-C levels, or a disease or disorder associated with abnormal lipid levels, e.g., a vascular disease or disorder or a metabolic disease or disorder.

TABLE 1
Sequence and position of SNPs associated with HDL-C.

| | | | 4 | | | | | 9 |
|---|---|---|---|---|---|---|---|---|
| 1 | 2 | 3 | Mutation | 5 | 6 | 7 | 8 | Genbank Accession |
| gene | SNP ID No. | Var freq | type | Ref NT | Var NT | Flanking sequence | SEQ ID NO | #, NT position |
| APOA1 | APOA1_{—} | .17 | Promoter | C | T | TGATAAGCCCAGCCC[CT] | SEQ ID NO:1 | GI: 5764724 |
| | | | | | | GGCCCTGTTGCTGCT | | (SEQ ID NO:27) |
| | | | | | | | | nt. 123408 |
| AT3 | AT3_1 | .36 | Silent | G | A | GAGCCTGGCCAAGGT[GA] | SEQ ID NO:2 | GI: 9931231 |
| | | | | | | GAGAAGGAACTCACC | | (SEQ ID NO:28) |
| | | | | | | | | nt. 77082 |
| CD14 | CD14_1 | .49 | Promoter | C | T | TCCTTCCTGTTACGG[CT] | SEQ ID NO:3 | GI: 400457 |
| | | | | | | CCCCCTCCCTGAAAC | | (SEQ ID NO:29) |
| | | | | | | | | nt. 2232 |
| COL5A2 | COL5A2_1 | .18 | Silent | G | A | CCCAACGGGCTCTCC[GA] | SEQ ID NO:4 | GI: 179697 |
| | | | | | | GGTACCTCTGGTCCT | | (SEQ ID NO:30) |
| | | | | | | | | nt. 1449 |
| ECE1 | ECE1_1 | .28 | Silent | G | A | CTCTTACCATCTGTC[GA] | SEQ ID NO:5 | GI: 14530800 |
| | | | | | | GTGGTGTTGATGAGA | | (SEQ ID NO:31) |
| | | | | | | | | nt. 75221 |
| EDNRB | EDNRB_1 | .40 | Silent | G | A | AAAAGATTGGTGGCT[GA] | SEQ ID NO:6 | GI: 2285955 |
| | | | | | | TTCAGTTTCTATTTC | | (SEQ ID NO:32) |
| | | | | | | | | nt 1064 |
| F2 | F2_1 | .12 | Mis (TM) | C | T | CCGACAGCAGCACCA[CT] | SEQ ID NO:7 | GI: 261694 |
| | | | | | | GGGACCCTGGTGCTA | | (SEQ ID NO:33) |
| | | | | | | | | nt. 42 |
| | | | | | | | | AA 165 |
| F2 | F2_3 | .06 | Non Coding | G | A | CTGCCTCCTGTACCC[GA] | SEQ ID NO:8 | GI: 558069 |
| | | | | | | CCCTGGGACAAGAAC | | (SEQ ID NO:34) |
| | | | | | | | | nt. 15419 |
| FABP3 | FABP3_1 | .04 | Mis (KR) | T | C | AAGGTGCTGTGTGTT[TC] | SEQ ID NO:9 | GI: 17902903 |
| | | | | | | TTAGGGTGAGAATGT | | (SEQ ID NO:35) |
| | | | | | | | | nt. 120178 |
| | | | | | | | | AA 207 |
| GBE1 | GBE1_1 | .03 | Mis (TA) | A | G | AACATGAGTGTCCTG[AG] | SEQ ID NO:10 | GI: 4557618 |
| | | | | | | CTCCTTTTACTCCAG | | (SEQ ID NO:36) |
| | | | | | | | | nt. 1597 |
| | | | | | | | | AA 506 |
| ITGB3 | ITGB3_2 | .29 | Silent | T | C | CTCCCGGGGGCTGCA[TC] | SEQ ID NO:11 | GI: 17488650 |
| | | | | | | TCGTCCTGCTGGGAA | | (SEQ ID NO:37) |
| | | | | | | | | nt: 98031 |
| ITGB3 | ITGB3_4 | .30 | Silent | C | T | TGCAGACGGGCTGAC[CT] | SEQ ID NO:12 | GI: 17488650 |
| | | | | | | CTCCCGGGGGCTGCA | | nt: 98019 |
| LIPC | LIPC_1 | .04 | Mis (VM) | G | A | CCTCAGGTGGACGGC[GA] | SEQ ID NO:13 | GI: 13374652 |
| | | | | | | TGCTAGAAAACTGGA | | (SEQ ID NO:38) |
| | | | | | | | | nt. 86244 |
| | | | | | | | | AA 95 |
| LIPC | LIPC_5 | .22 | Promoter | G | A | ACACAGTAGCTTTAA[GA] | SEQ ID NO:14 | GI: 187155 |
| | | | | | | TTGATTAATTTGGAA | | (SEQ ID NO:39) |
| | | | | | | | | nt. 1308 |
| LRP1 | LRP1_1 | .08 | Mis (VL) | G | T | CCCAACGGCATCTCA[GT] | SEQ ID NO:15 | GI: 3493562 |
| | | | | | | TGGACTACCAGGATG | | (SEQ ID NO:40) |
| | | | | | | | | nt. 1429 |
| LRP1 | LRP1_3 | .31 | Silent | C | T | CTTCCGGCTGMGGA[CT]G | SEQ ID NO:16 | GI: 3493567 |
| | | | | | | ACGGCCGGACGTGT | | (SEQ ID NO:41) |
| | | | | | | | | nt. 201 |
| LRP1 | LRP1_5 | .31 | Silent | C | T | TGAGGGCGAGCTCTG[CT] | SEQ ID NO:17 | GI: 3493558 |
| | | | | | | GGTGAGGCCTGGTCC | | (SEQ ID NO:42) |
| | | | | | | | | nt. 1209 |
| LRPAP1 | LRPAP1_1 | .10 | Silent | T | C | CTACAGCACTGAGGC[TC] | SEQ ID NO:18 | GI: 17977890 |
| | | | | | | GAGTTCGAGGAGCCC | | (SEQ ID NO:43) |
| | | | | | | | | nt. 51697 |
| MTHFR | MTHFR_1 | .32 | Mis | C | T | GATTTCATCATCA[CT]GC | SEQ ID NO:19 | GI: 4336810 |
| | | | (AV) | | | AGCTTTTCTTTGA | | (SEQ ID NO:44) |
| | | | | | | | | nt. 144 |
| PAI2 | PAI2_1 | .22 | Mis | G | C | TAGTTTTAGGGTGAG[GC] | SEQ ID NO:20 | GI: 6705901 |
| | | | (SC) | | | AAAATCTGCCGAAAA | | (SEQ ID NO:45) |
| | | | | | | | | nt. 164736 |
| PAI2 | PAI2_2 | .22 | Mis | G | C | GAAAAATAAAATGCA[GC] | SEQ ID NO:21 | GI: 6705901 |
| | | | (NK) | | | TTGGTTATCTTATGC | | nt. 164762 |
| PAI2 | PAI2_4 | .21 | Non | G | C | ATCTAGAAGCAAAGA[GC] | SEQ ID NO:22 | GI: 6705901 |
| | | | Coding | | | AGGAAGAAAAAAACA | | nt.176609 |
| PPARG | PPARG_1 | .12 | Mis | G | C | AGGAATCGCTTTCTG[GC] | SEQ ID NO:23 | GI: 13384351 |
| | | | (PA) | | | GTCAATAGGAGAATC | | (SEQ ID NO:46) |
| | | | | | | | | nt. 145136 |
| PRCP | PRCP_1 | .03 | Mis | G | C | GTGACTGCAACCAGA[GC] | SEQ ID NO:24 | GI: 12381909 |
| | | | (TS) | | | TGTCTGTGATATCCT | | (SEQ ID NO:47) |
| | | | | | | | | nt. 63956 |
| THBS4 | THBS4_1 | .20 | Mis | G | C | GAGTGTCGAAATGGA[GC] | SEQ ID NO:25 | GI: 14916146 |
| | | | (AP) | | | CGTGCGTTCCCAACT | | (SEQ ID NO:48) |
| | | | | | | | | nt. 105290 |
| VWF | VWF_2 | .12 | Silent | C | A | ACAGTCATTGGTGGC[GA] | SEQ ID NO:26 | GI: 4827300 |
| | | | | | | GTTGAGGCCAAGTAC | | (SEQ ID NO:49) |
| | | | | | | | | nt.18466 |

[0028] The polymorphisms of the present invention are single nucleotide polymorphisms (SNPs) at a specific nucleotide residue within the genes identified in Table 1. Each of these genes has at least two alleles, referred to herein as the reference allele and the variant allele. The reference allele (i.e., the consensus sequence, or wild type allele) has been designated based on it's frequency in a general U.S. Caucasian population sample. Nucleotide sequences in GenBank™ may correspond to either allele and correspond to the nucleotide sequence of the molecule which has been deposited in GenBank™ and given a specific Accession Number (e.g., GI 5764724 (SEQ ID NO: 27), the reference sequence for the APOA1 gene). As used herein, each reference sequence is identified by a “GI” GenBank™ Accession Number and a SEQ ID NO. The variant allele differs from the reference allele by at least one nucleotide at the site identified in Table 1. The present invention thus relates to nucleotides comprising either the reference allele or the variant allele of the genes identified in Table 1, and/or complements thereof, which are associated with low HDL-C. These alleles may be used in combination with each other or in combination with other SNPs to predict the risk of abnormal lipid levels, e.g., abnormally low HDL-C level, or a disease or disorder associated with abnormal lipid levels, e.g., a vascular or metabolic disease or disorder.

[0029] It is understood that the invention is not limited by these exemplified reference sequences, as variants of these sequences which differ at locations other than the SNP sites identified herein can also be utilized as reference sequences. The skilled artisan can readily determine the SNP sites in these other reference sequences which correspond to the SNP site identified herein by aligning the sequence of interest with the reference sequences specifically disclosed herein. Programs for performing such alignments are commercially available. For example, the ALIGN program in the GCG software package can be used, utilizing a PAM120 weight residue table, a gap length penalty of 12 and a gap penalty of 4, for example. Moreover, the reference sequences exemplified herein may or may not represent the coding strands of the genes described herein. One of skill in the art would readily be able to identify the coding strands for each of the genes described herein. Accordingly, both the coding strands and the non-coding strands of the polymorphic regions and SNPs described herein are understood to be included in the instant invention.

[0030] Cases which were used to identify associations between abnormal lipid levels and SNPs were drawn from the GeneQuest study, a collection of families with premature coronary artery disease. Subjects in the GeneQuest study all had premature CAD identified at one of 15 participating medical centers, fulfilling the criteria of either myocardial infarction, surgical or percutaneous revascularization, or a significant coronary artery lesion diagnosed before age 45 in males or age 50 in females and having a living sibling who met the same criteria. For this study, one individual per family was selected for genotyping. The final sample was comprised of 352 Caucasian individuals with a personal and family history of premature CAD.

[0031] Most of the allelic variants of the present invention were identified through denaturing high performance liquid chromatography (DHPLC) analysis, variant detector arrays (Affymetrix™), the polymerase chain reaction (PCR), and/or single stranded conformation polymorphism (SSCP) analysis using PCR primers complementary to intronic sequences surrounding each of the exons, 3′ UTR, and 5′ upstream regulatory element sequences of the genes. The polymorphic regions of the present invention have been identified in the genes by analyzing the DNA of cell lines derived from an ethnically diverse population by methods described in Cargill, et al. (1999 Nature Genetics 22:231-238).

[0032] The presence of polymorphisms in several genes were identified. The preferred polymorphisms of the invention are listed in Table 1. Table 1 contains a “SNP ID No.” in column 2, which is used herein to identify each of the variants. Each SNP is also designated by a SEQ ID NO in column 8 (SEQ ID NOs.: 1-26). The SEQ ID NO. contains the variant nucleotide as well as the 15 nucleotides flanking the polymorphic nucleotide residue (i.e., 15 nucleotides 5′ of the polymorphism and 15 nucleotides 3′ of the polymorphism), shown in column 7. The variant nucleotide is indicated by the second nucleotide contained within the brackets, e.g., a C→T change is indicated as [C/T]. Column 4 describes the type of variant, e.g., either non-coding, missense, silent, or promoter.

[0033] The polymorphisms are identified based on a change in the nucleotide sequence from a consensus sequence, or the “reference sequence.” To identify the location of the polymorphisms of the present invention, a specific nucleotide residue in a reference sequence is listed for the polymorphism, where nucleotide residue number 1 is the first (i.e., 5′) nucleotide in each reference sequence. Column 9 of Table 1 lists the reference sequence and polymorphic nucleotide residue for the polymorphisms.

[0034] Significant associations (p≦0.05) were found in both males and females between HDL-C levels and SNPs in nine genes as set forth in Table 2, below.

TABLE 2
Mean HDL-C levels by genotype in GeneQuest population for significant
associations.

| SNP | Genotype | N | Mean HDL-C (SD) | p-value |
|---|---|---|---|---|
| APOA1_1 | CC | 206 | 37.7 (9.6) | .01 |
| | TC/TT | 102 | 41.2 (13.3) | |
| CD14_1 | TT | 84 | 41.5 (11.1) | .002 |
| | CT | 149 | 36.5 (9.9) | |
| | CC | 81 | 39.8 (11.7) | |
| COL5A2_1 | GG | 180 | 39.5 (10.2) | .0006 |
| | AG | 84 | 42.4 (11.3) | |
| | AA | 8 | 53.1 (14.7) | |
| EDNRB_1 | GG | 125 | 42.0 (11.7) | .005 |
| | AG | 160 | 37.9 (10.7) | |
| | AA | 38 | 37.8 (8.1) | |
| FABP3_1 | TT | 314 | 39.5 (11.1) | .01 |
| | CT | 25 | 33.7 (8.0) | |
| GBE1_1 | AA | 315 | 39.5 (10.9) | .01 |
| | AG/GG | 24 | 33.8 (10.4) | |
| LIPC_5 | GG | 184 | 38.3 (10.5) | .03 |
| | AG | 109 | 41.1 (12.5) | |
| | AA | 23 | 35.4 (8.3) | |
| MTHFR_1 | CC | 146 | 37.2 (10.1) | .05 |
| | CT | 112 | 39.4 (11.6) | |
| | TT | 45 | 41.4 (11.4) | |
| VWF_2 | GG | 253 | 38.4 (10.8) | .04 |
| | GA | 63 | 41.5 (12.0) | |
| | AA | | | |

SD = Standard deviation.

[0035] As shown in Table 2, a subject (either male or female) having the APOA_{—}1 CC genotype, the CD14_{—}1 CT genotype, the COL5A2_{—}1 GG genotype, the EDNRB_{—}1 AG or AA genotype, the FABP3_{—}1 CT genotype, the GBE1_{—}1 AG or GG genotype, the LIPC_{—}5 AA genotype, the MTHFR_{—}1 CC genotype, or the VWF_{—}2 GG genotype is more likely to have or to develop abnormal lipid levels, e.g., an abnormally low HDL-C level.

[0036] Associations between HDL-C and variants in ten additional genes were found when males and females were analyzed separately (see Table 3, below). These SNPs, identified through significant SNP by sex interaction, usually conferred the opposite effect in males and females. However, the effect in females was typically stronger, resulting in significant associations (p≦0.05).

TABLE 3
Gender-specific mean HDL-C by genotype for significant interactions.

| | Intx P | Geno- | | Mean (SD) | P-value | | Mean (SD) | P-value |
|---|---|---|---|---|---|---|---|---|
| SNP | value | type | N | males | males | N | females | females |
| AT3_1 | .02 | GG | 86 | 36.6 (9.7) | .54 | 40 | 45.9 (11.7) | .03 |
| | | AG | 96 | 38.1 (10.7) | | 38 | 39.5 (10.7) | |
| | | AA | 28 | 36.3 (12.0) | | 14 | 39.9 (10.0) | |
| ECEl_1 | .03 | GG | 104 | 37.0 (10.6) | .12 | 50 | 42.8 (11.2) | .19 |
| | | AG | 86 | 36.8 (10.1) | | 35 | 43.0 (11.7) | |
| | | AA | 19 | 42.3 (13.4) | | 4 | 32.3 (11.4) | |
| F2_1 | .008 | CC | 173 | 37.6 (10.5) | .24 | 77 | 41.1 (10.6) | .05 |
| | | CT | 44 | 35.0 (9.6) | | 16 | 48.6 (14.5) | |
| | | TT | 5 | 41.0 (8.4) | | 3 | 38.0 (5.3) | |
| ITGB3_4 | .02 | CC | 98 | 37.1 (10.7) | .72 | 46 | 42.2 (10.7) | .005 |
| | | TC | 77 | 37.9 (10.4) | | 28 | 38.5 (8.1) | |
| | | TT | 24 | 39.1 (12.9) | | 55 | 55.2 (17.3) | |
| LIPC_1 | .03 | GG | 203 | 37.4 (10.6) | .84 | 91 | 43.3 (11.3) | .02 |
| | | AG/AA | 20 | 37.8 (10.5) | | 6 | 32.3 (8.6) | |
| LRP1_1 | .01 | GG | 185 | 37.5 (10.7) | .50 | 78 | 44.1 (11.2) | .02 |
| | | GT/TT | 43 | 38.7 (10.9) | | 20 | 37.3 (10.7) | |
| LRP1_3 | .03 | CC | 79 | 37.3 (11.1) | .05 | 33 | 43.8 (11.5) | .19 |
| | | CT | 99 | 36.5 (10.1) | | 51 | 42.3 (12.0) | |
| | | TT | 17 | 43.4 (12.3) | | 4 | 32.5 (4.2) | |
| LRPAP1_1 | .05 | TT | 180 | 37.3 (10.4) | .17 | 73 | 43.9 (11.7) | .16 |
| | | CT/CC | 40 | 39.8 (10.7) | | 19 | 39.7 (10.8) | |
| PAI2_4 | .02 | CC | 113 | 38.7 (10.9) | .05 | 55 | 42.8 (12.1) | .13 |
| | | CG | 62 | 41.2 (10.0) | | 28 | 43.9 (9.3) | |
| | | GG | 9 | 32.6 (10.6) | | 45 | 54.8 (31.6) | |
| PPARG_1 | .007 | CC | 184 | 38.1 (10.8) | .05 | 83 | 41.2 (11.1) | .03 |
| | | CG | 46 | 34.9 (8.8) | | 16 | 48.4 (11.1) | |
| | | GG | 6 | 44.0 (10.0) | | 1 | 57.0 | |
| PRCP_1 | .003 | CC | 221 | 38.0 (10.7) | .06 | 96 | 41.8 (11.3) | .02 |
| | | CG/GG | 19 | 33.3 (6.1) | | 5 | 53.8 (2.2) | |
| THBS4_1 | .006 | GG | 134 | 36.8 (10.6) | .42 | 58 | 43.8 (11.4) | .02 |
| | | CG | 86 | 38.5 (9.9) | | 35 | 38.7 (9.9) | |
| | | CC | 13 | 35.5 (10.7) | | 7 | 50.4 (13.1) | |

SD = Standard deviation.

[0037] As shown in Table 3, the AT3_{—}1, F2_{—}1, ITGB3_{—}4, LIPC_{—}1, LRP1_{—}1, PRCP_{—}1, and THBS4_{—}1 SNPs had a significant association with HDL-C level in females. The LRP1_{—}3, PAI2_{—}4, and PPARG_{—}1 SNPs had a significant association with HDL-C level in males.

[0038] A female subject having the AT3_{—}1 AG or AA genotype, the F2_{—}1 TT genotype, the ITGB3_{—}4 TC genotype, the LIPC_{—}1 AG or AA genotype, the LRP1_{—}1 GT or TT genotype, the PPARG_{—}1 CC genotype, the PRCP_{—}1 CC genotype, or the THBS4_{—}1 GG or GC genotype is more likely to have or to develop abnormal lipid levels, e.g., abnormally low HDL-C levels.

[0039] A male subject having the LRP1_{—}3 CC or CT genotype, the PAI2_{—}4 GG genotype, or the PPARG_{—}1 CG genotype is more likely to have or to develop abnormal lipid levels, e.g., abnormally low HDL-C levels.

[0040] For some genes multiple SNPs were typed. In some cases, SNPs in a gene were highly correlated, or in linkage disequilibrium with each other, and yet not all of these SNPs showed significant (p≦0.05) associations with HDL-C. The term “linkage disequilibrium,” also referred to herein as “LD,” refers to a greater than random association between specific alleles at two marker loci within a particular population. A SNP in linkage disequilibrium with another SNP which shows an association may be considered as a marker for the SNP with an association, and, therefore, a risk factor (albeit not independent of the associated SNP). Accordingly, if linkage disequilibrium exists between two markers, or SNPs, then the genotypic information at one marker, or SNP, can be used to make probabilistic predictions about the genotype of the second marker.

[0041] Table 4, below, shows SNPs which are in linkage disequilibrium with certain SNPs of the invention. These SNPs, therefore, may also be used as markers for abnormal lipid levels, e.g., abnormally low HDL-C levels.

TABLE 4
SNPs in linkage disequilibrium with associated SNPs from Tables 2 and 3.

| gene | SNP pair | D′ | P |
|---|---|---|---|
| F2 | F2_1 | −.77 | .008 |
| | F2_3 | | |
| ITGB3 | ITGB3_2 | .99 | <.0001 |
| | ITGB3_4 | | |
| LRP1 | LRP1_3 | .99 | <.0001 |
| | LRP1_5 | | |
| PAI2 | PAI2_1 | 1.0 | <.0001 |
| | PAI2_2 | | |
| PAI2 | PAI2_1 | .80 | <.0001 |
| | PAI2_4 | | |
| PAI2 | PAI2_2 | .80 | <.0001 |
| | PAI2_4 | | |

[0042] For example, in the LRP1 gene, the LRP1_{—}3 SNP and the LRP1_{—}5 SNP are in LD (D′=0.99; p=<0.0001). LRP1_{—}3 shows a significant association with abnormal lipid level in males (p<0.05; see Table 3). Although LRP1_{—}5 does not show a significant association with abnormal lipid level in the population tested, it may be used as a marker for abnormal lipid level because it is in LD with LRP1_{—}3. For two genes where multiple SNPs were typed, more than one SNP showed a statistically significant association with HDL-C. In the LIPC gene, both the LIPC_{—}1 and LIPC_{—}5 SNPs were associated with HDL-C. These two SNPs are not in linkage disequilibrium (D′=0.10, p=0.37). Therefore, they represent independent risk factors. Similarly, in the LRP1 gene, two SNPs were significantly associated with HDL-C, LRP1_{—}1 and LRP1_{—}3. These SNPs are not in linkage disequilibrium (D′=−0.13, p=0.49) and therefore represent independent associations.

[0043] Results from a multivariate analysis (see Table 6 and Table 7, in the Example section) revealed that different combinations of genes may influence HDL-C levels in males and females. In females, five genes were independently associated with HDL-C including COL5A2, CD14, F2, VWF and ITGB3. In our population, the combination of these five SNPs account for approximately 65% of the variability in HDL-C (overall model p<0.0001).

[0044] Female subjects having or at risk for developing the lowest levels of HDL-C are those with the following combination of genotypes: COL5A2_{—}1 GG, CD14_{—}1 CT, VWF_{—}2 GA and ITGB3_{—}4 TC. This combination is estimated to have a frequency of approximately 3% in a general U.S. Caucasian population.

[0045] In males, a different combination of three genes was identified. COL5A2, CD14, and FABP3 were independently associated with HDL-C and together account for approximately 21% of the variation in HDL-C in males (overall model p<0.0001).

[0046] Male subjects having or at risk for developing the lowest levels of HDL-C are those with the following combination of genotypes: COL5A2_{—}1 GG, CD14_{—}1 CT or CC, and FABP3_{—}1 CT. This combination is estimated to have a frequency of approximately 4% in a general U.S. Caucasian population.

[0047] Accordingly, specific alleles which indicate that a subject is more likely to have or to be at a higher than normal risk of developing abnormal lipid levels, e.g., low HDL-C levels, or a disease or disorder associated with abnormal lipid levels, e.g., a vascular disease or disorder or a metabolic disease or disorder, are set forth in Table 5, below.

TABLE 5

| | | |
|---|---|---|
| Gene | SNP | Alleles |

Male or Female:

| | | |
|---|---|---|
| APOA1 | APOA_1 | CC |
| CD14 | CD14_1 | CT |
| COL5A2 | COL5A2_1 | GG |
| EDNRB | EDNRB_1 | AG or AA |
| FABP3 | FABP3_1 | CT |
| GBE1 | GBE1_1 | AG or GG |
| LIPC | LIPC_5 | AA |
| MTHFR | MTHFR_1 | CC |
| VFW | VWF_2 | GG |

Female:

| | | |
|---|---|---|
| AT3 | AT3_1 | AG or AA |
| F2 | F2_1 | TT |
| ITGB3 | ITGB3_4 | TC |
| LIPC | LIPC_1 | AG or AA |
| LRP1 | LRP1_1 | GT or TT |
| PPARG | PPARG_1 | CC |
| PRCP | PRCP_1 | CC |
| THBS4 | THBS4_1 | GG or GC |
| COL5A2 | COL5A2_1 | GG |
| CD14 | CD14_1 | CT |
| VWF | VWF_2 | GA |
| ITGB3 | ITGB3_4 | TC |
| | (in combination) | |

Male:

| | | |
|---|---|---|
| LRP1 | LRP1_3 | CC or CT |
| PAI | PAI2_4 | GG |
| PPARG | PPARG_1 | CG |
| COL5A2 | COL5A2_1 | GG |
| CD14 | CD14_1 | CT or CC |
| FABP3 | FABP3_1 (in combination) | CT |

[0048] The invention further relates to nucleotides comprising portions of the variant alleles and/or portions of complements of the variant alleles which comprise the site of the polymorphism and are at least 5 nucleotides or basepairs in length. Portions can be, for example, 5-10, 5-15, 10-20, 2-25, 10-30, 10-50 or 10-100 bases or basepairs long. For example, a portion of a variant allele which is 31 nucleotides or basepairs in length includes the polymorphism (i.e., the nucleotide(s) which differ from the reference allele at that site) and thirty additional nucleotides or basepairs which flank the site in the variant allele. These additional nucleotides and basepairs can be on one or both sides of the polymorphism. The polymorphisms which are the subject of this invention are defined in Table 1 with respect to the reference sequence identified in Table 1.

[0049] The nucleic acid molecules of the invention can be double- or single-stranded. Accordingly, the invention further provides for the complementary nucleic acid strands comprising the polymorphisms listed in Tables 1-5.

[0050] The invention further provides allele-specific oligonucleotides that hybridize to a gene comprising a SNP or to the complement of the gene. Such oligonucleotides will hybridize to one polymorphic form of the nucleic acid molecules described herein but not to the other polymorphic form of the sequence. Thus such oligonucleotides can be used to determine the presence or absence of particular alleles of the polymorphic sequences described herein. These oligonucleotides can be probes or primers. Other aspects of the invention are described below or will be apparent to one of skill in the art in light of the present disclosure.

[0051] Description Of Genes Containing SNPs of the Present Invention

[0052] APOA1

[0053] Apolipoprotein A-I (APOA1) promotes cholesterol efflux from tissues to the liver for excretion. APOA1 is the major protein component of high density lipoprotein (HDL) in the plasma. Synthesized in the liver and small intestine, it consists of two identical chains of 77 amino acids; an 18-amino acid signal peptide is removed co-translationally and a 6-amino acid propeptide is cleaved post-translationally. Variation in the latter step, in addition to modifications leading to so-called isoforms, is responsible for some of the polymorphisms observed. APOA1 is a cofactor for lecithin cholesterolacyltransferase (LCAT) which is responsible for the formation of most plasma cholesteryl esters. The APOA1, APOC3 and APOA4 genes are closely linked in both rat and human genomes. The A-I and A-IV genes are transcribed from the same strand, while the C-III gene is transcribed convergently in relation to A-I. Defects in the apolipoprotein A-1 gene are associated with HDL deficiency and Tangier disease.

[0054] AT3

[0055] Antithrombin III (AT3) is the sole blood component through which heparin exerts its anticoagulant effect. In persons with AT3 deficiency the effect may lead to recurrent thrombosis despite heparin therapy.

[0056] CD14

[0057] CD14 is a single-copy gene encoding 2 protein forms: a 50- to 55-kD lycosylphosphatidylinositol-anchored membrane protein (mCD14) and a monocyte or liver-derived soluble serum protein (sCD14) that lacks the anchor. Both molecules are critical for lipopolysaccharide (LPS)-dependent signal transduction, and sCD14 confers LPS sensitivity to cells lacking mCD14. The expression profile of CD14, as well as its inclusion in the family of leucine-rich proteins and the chromosomal location of other receptor genes, supports the hypothesis that CD14 functions as a receptor Glycoprotein CD14 on the surface of human macrophages is important for the recognition and clearance of apoptotic cells. CD14 can also act as a receptor that binds bacterial LPS, triggering inflammatory responses.

[0058] COL5A2

[0059] Type V collagen (COL5A2) is a member of group I collagen (fibrillar forming collagen). This gene encodes an alpha chain for one of the low abundance fibrillar collagens. Fibrillar collagen molecules are trimers that can be composed of one or more types of alpha chains. Type V collagen is found in tissues containing type I collagen and appears to regulate the assembly of heterotypic fibers composed of both type I and type V collagen. This gene product is closely related to type XI collagen and it is possible that the collagen chains of types V and XI constitute a single collagen type with tissue-specific chain combinations. Mutations in this gene are associated with Ehlers-Danlos syndrome, types I and II. Two transcripts that differ in the length of the 3′UTR due to the use of alternative polyadenylation signals have been identified for this gene.

[0060] ECE1

[0061] Endothelin converting enzyme (ECE1) is a metalloprotease that regulates a peptide involved in vasoconstriction.

[0062] EDNRB

[0063] Endothelin receptor type B (EDNRB) is a G protein-coupled receptor which activates a phosphatidylinoitol-calcium second messenger system. Its ligand, endothelin, consists of a family of three potent vasoactive peptides: ET1, ET2, and ET3. Studies suggest that the multigenic disorder, Hirschsprung disease type 2, is due to mutation in endothelin receptor type B gene. A splice variant, named SVR, has been described; the sequence of the ETB-SVR receptor is identical to ETRB except for the intracellular C-terminal domain. While both splice variants bind ET 1, they exhibit different responses upon binding which suggests that they may be functionally distinct.

[0064] F2

[0065] Coagulation factor II (F2) is proteolytically cleaved to form thrombin in the first step of the coagulation cascade which ultimately results in the stemming of blood loss. F2 also plays a role in maintaining vascular integrity during development and postnatal life. Mutations in F2 lead to various forms of thrombosis and dysprothrombinemia.

[0066] FABP3

[0067] Fatty acid metabolism in mammalian cells depends on a flux of fatty acids, between the plasma membrane and mitochondria or peroxisomes for beta-oxidation, and between other cellular organelles for lipid synthesis. At least 3 different fatty acid-binding proteins (FABPs) play a role as transport vehicles of these hydrophobic compounds throughout the cytoplasm. Different FABPs have been demonstrated in the liver, heart, intestine, skeletal muscle, and brain.

[0068] GBE1

[0069] The glucan (1,4-alpha)-branching enzyme-1 (GBE 1) is required for sufficient glycogen accumulation. The alpha 1-6 branches of glycogen play an important role in increasing the solubility of the molecule and, consequently, in reducing the osmotic pressure within cells. Highest levels found in liver and muscle. GBE1 belongs to family 13 of glycosyl hydrolases, also known as the alpha-amylase family. Mutations in this gene cause a rare form of glycogenosis, glycogen storage disease IV.

[0070] ITGB3

[0071] The ITGB3 protein product is the integrin beta chain beta 3. Integrins are integral cell-surface proteins composed of an alpha chain and a beta chain. A given chain may combine with multiple partners resulting in different integrins. ITGB3 is found along with the alpha IIb chain in platelets. Integrins are known to participate in cell adhesion as well as cell-surface mediated signaling.

[0072] LIPC

[0073] LIPC encodes hepatic triglyceride lipase, which is expressed in liver. LIPC has the dual functions of triglyceride hydrolase and ligand/bridging factor for receptor-mediated lipoprotein uptake.

[0074] LRP1

[0075] LRP is identical to the alpha-2-macroglobulin receptor (A2MR). Like the mannose-6-phosphate receptor (147280), the A2MR/LRP molecule is probably bi-functional. LRP1 had been shown to function as a receptor for the uptake of apolipoprotein E-containing lipoprotein particles by neurons.

[0076] LRPAP1

[0077] Alpha-2-macroglobulin receptor-associated protein (LRPAP1) prevents premature binding of ligands to receptors. LRPAP1 also enables correct folding and export from the ER of alpha-2-macroglobulin receptor, and affects interactions between plasma membranes and basement membranes.

[0078] MTHFR

[0079] MTHFR is an enzyme that catalyzes the conversion of 5,10-methylenetetrahydrofolate to 5-methyltetrahydrofolate, a co-substrate for homocysteine remethylation to methionine, which is important in folate metabolism.

[0080] PAI2

[0081] The specific inhibitors of plasminogen activators have been classified into 4 immunologically distinct groups: PAI1 type PA inhibitor from endothelial cells; PAI2 type PA inhibitor from placenta, monocytes, and macrophages; urinary inhibitor; and protease-nexin-I. Plasminogen activator inhibitor-2 (PAI2) is also known as monocyte arg-serpin because it belongs to the superfamily of serine proteases in which the target specificity of each is determined by the amino acid residue located at its reactive center; i.e., met or val for elastase, leu for kinase, and arg for thrombin. PAI2 is thought to serve as a primary regulator of plasminogen activation in the extravascular compartment. High levels of PAI2 are found in keratinocytes, monocytes, and the human trophoblast, the latter suggesting a role in placental maintenance or in embryo development. The primarily intracellular distribution of PAI2 may also indicate a unique regulatory role in a protease-dependent cellular process such as apoptosis.

[0082] PPARG

[0083] The peroxisome proliferator-activated receptors (PPARs) are members of the nuclear hormone receptor subfamily of transcription factors. PPARs form heterodimers with retinoid X receptors (RXRs) and these heterodimers regulate transcription of various genes. There are 3 known subtypes of PPARs, PPAR-alpha, PPAR-delta, and PPAR-gamma. PPAR-gamma is believed to be involved in adipocyte differentiation. PPAR-gamma is induced in human monocytes following exposure to oxLDL and is expressed at high levels in the foam cells of atherosclerotic lesions. Endogenous PPAR-gamma ligands may be important regulators of gene expression during atherogenesis. In addition to lipid uptake, PPARG regulates a pathway of cholesterol efflux. There are 3 PPARG isoforms which differ at their 5-prime ends, each under the control of its own promoter. PPARG1 and PPARG3, however, give rise to the same protein, encoded by exons 1 through 6.

[0084] PRCP

[0085] Prolylcarboxypeptidase (PRCP) cleaves C-terminal amino acids linked to a penultimate proline, if proline has a protected amino group or is part of a peptide chain. Because angiotensins II and III have the same C terminus and are substrates for the enzyme, prolylcarboxypeptidase was named angiotensinase C. The protein comprises 451 amino acids.

[0086] THBS4

[0087] The thrombospondins are a family of extracellular calcium binding proteins involved in cell proliferation, adhesion, and migration. The human thrombospondin-4 (THBS4) gene has been isolated from a heart expression library. Electron microscopy indicated that it is composed of 5 subunits with globular domains at each end. THBS4 binds to heparin and calcium.

[0088] VWF

[0089] The glycoprotein encoded by this gene functions as both an antihemophilic factor carrier and a platelet-vessel wall mediator in the blood coagulation system. It is crucial to the hemostasis process. Mutations in this gene or deficiencies in this protein result in von Willebrand's disease.

[0090] Definitions

[0091] For convenience, the meaning of certain terms and phrases employed in the specification, examples, and appended claims are provided below.

[0092] The term “allele,” which is used interchangeably herein with “allelic variant” refers to alternative forms of a gene or portions thereof. Alleles occupy the same locus or position on homologous chromosomes. When a subject has two identical alleles of a gene, the subject is said to be homozygous for the gene or allele. When a subject has two different alleles of a gene, the subject is said to be heterozygous for the gene or allele. Alleles of a specific gene can differ from each other in a single nucleotide, or several nucleotides, and can include substitutions, deletions, and insertions of nucleotides. An allele of a gene can also be a form of a gene containing one or more mutations.

[0093] The term “allelic variant of a polymorphic region of a gene” refers to an alternative form of a gene having one of several possible nucleotide sequences found in that region of the gene in the population.

[0094] “Biological activity” or “bioactivity” or “activity” or “biological function”, which are used interchangeably, for the purposes herein, with respect to the molecules described herein, e.g., the polypeptides encoded by the genes listed in Tables 1-5, means an effector or antigenic function that is directly or indirectly performed by a polypeptide (whether in its native or denatured conformation), or by a fragment thereof. Biological activities include modulation of the development of atherosclerotic plaque leading to vascular disease and other biological activities, whether presently known or inherent, binding to a ligand, e.g., a lipid or lipoprotein, such as LDL or modified forms thereof, or HDL or modified forms thereof, or a biological activity of a polypeptide as described above. A bioactivity can be modulated by directly affecting a corresponding protein effected by, for example, changing the level of effector or substrate level. Alternatively, a bioactivity can be modulated by modulating the level of a protein, such as by modulating expression of the gene encoding the protein. Antigenic functions include possession of an epitope or antigenic site that is capable of cross-reacting with antibodies that bind a native or denatured polypeptide or fragment thereof.

[0095] Biologically active polypeptides include polypeptides having both an effector and antigenic function, or only one of such functions. Polypeptides include antagonist polypeptides and native polypeptides, provided that such antagonists include an epitope of a native polypeptide. An effector function of a polypeptide can be the ability to bind to a ligand.

[0096] As used herein the term “bioactive fragment of a protein” refers to a fragment of a full-length protein, wherein the fragment specifically mimics or antagonizes the activity of a wild-type protein. The bioactive fragment preferably is a fragment capable of binding to a second molecule, such as a ligand.

[0097] The term “an aberrant activity” or “abnormal activity”, as applied to an activity of a protein encoded by a gene listed in Tables 1-5, refers to an activity which differs from the activity of the normal or reference protein or which differs from the activity of the protein in a healthy subject, e.g., a subject not afflicted with a disease associated with an allelic variant described herein. An activity of a protein can be aberrant because it is stronger than the activity of its wild-type counterpart. Alternatively, an activity of a protein can be aberrant because it is weaker or absent relative to the activity of its normal or reference counterpart. An aberrant activity can also be a change in reactivity. For example an aberrant protein can interact with a different protein or ligand relative to its normal or reference counterpart. A cell can also have aberrant activity due to overexpression or underexpression of the gene. Aberrant activity can result from a mutation in the gene, which results, e.g., in lower or higher binding affinity of a ligand to the protein encoded by the mutated gene. Aberrant activity can also result from an abnormal 5′ upstream regulatory element activity.

[0098] “Cells,” “host cells” or “recombinant host cells” are terms used interchangeably herein. It is understood that such terms refer not only to the particular cell but to the progeny or derivatives of such a cell. Because certain modifications may occur in succeeding generations due to either mutation or environmental influences, such progeny may not, in fact, be identical to the parent cell, but are still included within the scope of the term as used herein.

[0099] As used herein, the term “course of clinical therapy” refers to any chosen method to treat, prevent, or ameliorate abnormal lipid levels, e.g., abnormally low HDL-C levels, or a disease or disorder associated with abnormal lipid levels, e.g., a vascular or metabolic disease or disorder, symptoms thereof, or related diseases or disorders. Courses of clinical therapy include, but are not limited to, lifestyle changes (e.g., changes in diet, exercise, or environment), administration of medication, e.g., lipid modulating medication. Clinical course of therapy for treatment or prevention or amelioration of vascular disease in particular includes, for example, use of medical devices, such as, but not limited to, a defibrillator, a stent, a device used in coronary revascularization, a pacemaker, or any combination thereof, and surgical procedures such as percutaneous transluminal coronary balloon angioplasty (PTCA) or laser angioplasty, or other surgical intervention, such as, for example, coronary bypass grafting (CABG), or any combination thereof.

[0100] As used herein, the term “gene” or “recombinant gene” refers to a nucleic acid molecule comprising an open reading frame and including at least one exon and (optionally) an intron sequence. The term “intron” refers to a DNA sequence present in a given gene which is spliced out during mRNA maturation.

[0101] As used herein, the term “genetic profile” refers to the information obtained from identification of the specific allelic variants of a subject, e.g., the specific allelic variants of the SNPs identified in Tables 1-5. For example, genetic profile refers to the specific allelic variants of a subject within a gene identified in Tables 1-5. For example, one can determine a subject's APOA1 genetic profile by determining the identity of one or more of the nucleotides present at nucleotide residue 123408 of GI 5764724 (SEQ ID NO: 27, the APOA1 gene), or the complements thereof. The genetic profile of a particular disease can be ascertained through identification of the identity of allelic variants in one or more genes which are associated with the particular disease.

[0102] “Homology” or “identity” or “similarity” refers to sequence similarity between two peptides or between two nucleic acid molecules. Homology can be determined by comparing a position in each sequence which may be aligned for purposes of comparison. When a position in the compared sequence is occupied by the same base or amino acid, then the molecules are homologous at that position. A degree of homology between sequences is a function of the number of matching or homologous positions shared by the sequences. An “unrelated” or “non-homologous” sequence shares less than 40% identity, though preferably less than 25% identity, with one of the sequences of the present invention.

[0103] To determine the percent identity of two amino acid sequences or of two nucleic acids, the sequences are aligned for optimal comparison purposes (e.g., gaps can be introduced in the sequence of a first amino acid or nucleic acid sequence for optimal alignment with a second amino or nucleic acid sequence). The amino acid residues or nucleotides at corresponding amino acid positions or nucleotide positions are then compared. When a position in the first sequence is occupied by the same amino acid residue or nucleotide as the corresponding position in the second sequence, then the molecules are identical at that position. The percent identity between the two sequences is a function of the number of identical positions shared by the sequences (i.e., % identity=number of identical positions/total number of positions (e.g., overlapping positions)×100). In one embodiment the two sequences are the same length.

[0104] The determination of percent identity between two sequences can be accomplished using a mathematical algorithm. A preferred, non-limiting example of a mathematical algorithm utilized for the comparison of two sequences is the algorithm of Karlin and Altschul (1990) Proc. Natl. Acad. Sci. USA 87:2264-2268, modified as in Karlin and Altschul (1993) Proc. Natl. Acad. Sci. USA 90:5873-5877. Such an algorithm is incorporated into the NBLAST and XBLAST programs of Altschul, et al. (1990) J. Mol. Biol. 215:403-410. BLAST nucleotide searches can be performed with the NBLAST program, score=100, wordlength=12 to obtain nucleotide sequences homologous to a nucleic acid molecules of the invention. BLAST protein searches can be performed with the XBLAST program, score=50, wordlength=3 to obtain amino acid sequences homologous to a protein molecules of the invention. To obtain gapped alignments for comparison purposes, Gapped BLAST can be utilized as described in Altschul et al. (1997) Nucleic Acids Res. 25:3389-3402. Alternatively, PSI-Blast can be used to perform an iterated search which detects distant relationships between molecules. When utilizing BLAST, Gapped BLAST, and PSI-Blast programs, the default parameters of the respective programs (e.g., XBLAST and NBLAST) can be used. Another preferred, non-limiting example of a mathematical algorithm utilized for the comparison of sequences is the algorithm of Myers and Miller, (1988) CABIOS 4:11-17. Such an algorithm is incorporated into the ALIGN program (version 2.0) which is part of the GCG sequence alignment software package. When utilizing the ALIGN program for comparing amino acid sequences, a PAM120 weight residue table, a gap length penalty of 12, and a gap penalty of 4 can be used. Yet another useful algorithm for identifying regions of local sequence similarity and alignment is the FASTA algorithm as described in Pearson and Lipman (1988) Proc. Natl. Acad. Sci. USA 85:2444-2448. When using the FASTA algorithm for comparing nucleotide or amino acid sequences, a PAM120 weight residue table can, for example, be used with a k-tuple value of 2.

[0105] The term “a homolog of a nucleic acid” refers to a nucleic acid having a nucleotide sequence having a certain degree of homology with the nucleotide sequence of the nucleic acid or complement thereof. For example, a homolog of a double stranded nucleic acid having SEQ ID NO: N is intended to include nucleic acids having a nucleotide sequence which has a certain degree of homology with SEQ ID NO: N or with the complement thereof. Preferred homologs of nucleic acids are capable of hybridizing to the nucleic acid or complement thereof.

[0106] The term “hybridization probe” or “primer” as used herein is intended to include oligonucleotides which hybridize bind in a base-specific manner to a complementary strand of a target nucleic acid. Such probes include peptide nucleic acids, and described in Nielsen et al, (1991) Science 254:1497-1500. Probes and primers can be any length suitable for specific hybridization to the target nucleic acid sequence. The most appropriate length of the probe and primer may vary depending on the hybridization method in which it is being used; for example, particular lengths may be more appropriate for use in microfabricated arrays, while other lengths may be more suitable for use in classical hybridization methods. Such optimizations are known to the skilled artisan. Suitable probes and primers can range form about 5 nucleotides to about 30 nucleotides in length. For example, probes and primers can be 5, 6, 8, 10, 12, 14, 16, 18, 20, 22, 24, 25, 26, 28 or 30 nucleotides in length. The probe or primer of the invention comprises a sequence that flanks and/or preferably overlaps, at least one polymorphic site occupied by any of the possible variant nucleotides. The nucleotide sequence of an overlapping probe or primer can correspond to the coding sequence of the allele or to the complement of the coding sequence of the allele.

[0107] A “disease or disorder associated with abnormal HDL-C level” or a “disease or disorder associated with abnormal lipid levels,” as used herein, includes any disease, disorder, or condition for which abnormal lipid levels, e.g., abnormal HDL-C levels, is a risk factor, e.g., a vascular or metabolic disease or disorder. The term “vascular disease or disorder” as used herein refers to any disease, disorder, or condition effecting the vascular system, including the heart and blood vessels. A vascular disease or disorder includes any disease, disorder or condition characterized by vascular dysfunction, including, for example, intravascular stenosis (narrowing) or occlusion (blockage), due to the development of atherosclerotic plaque and diseases and disorders resulting therefrom. Examples of vascular diseases and disorders include, without limitation, abnormal lipid metabolism, abnormal lipid level, abnormal HDL-C level, atherosclerosis, CAD, MI, ischemia, stroke, peripheral vascular diseases, venous thromboembolism and pulmonary embolism.

[0108] As used herein, the term “metabolic disease or disorder” includes a disorder, disease or condition which is caused or characterized by an abnormal metabolism, i.e., the chemical changes in living cells by which energy is provided for vital processes and activities in a subject. Metabolic diseases and disorders include diseases, disorders, or conditions associated with abnormal lipid levels, e.g., abnormal HDL-C level. Examples of metabolic diseases and disorders include obesity, diabetes, hyperphagia, endocrine abnormalities, triglyceride storage disease, Bardet-Biedl syndrome, Lawrence-Moon syndrome, Prader-Labhart-Willi syndrome, anorexia, and cachexia. Obesity is defined as a body mass index (BMI) of 30 kg/²m or more (National Institute of Health, Clinical Guidelines on the Identification, Evaluation, and Treatment of Overweight and Obesity in Adults (1998)). However, the present invention is also intended to include a disease, disorder, or condition that is characterized by a body mass index (BMI) of 25 kg/²m or more, 26 kg/²m or more, 27 kg/²m or more, 28 kg/²m or more, 29 kg/²m or more, 29.5 kg/²m or more, or 29.9 kg/²more, all of which are typically referred to as overweight (National Institute of Health, Clinical Guidelines on the Identification, Evaluation, and Treatment of Overweight and Obesity in Adults (1998)).

[0109] As used herein, the term “abnormally low” HDL-C level refers to an HDL-C level which is lower than the level generally accepted by one of skill in the art as being normal, e.g., lower than approximately 35 mg/dl in males or lower than approximately 40 mg/dl in females.

[0110] The term “interact” as used herein with respect to interaction between molecules, is meant to include detectable interactions between molecules, such as can be detected using, for example, a binding or hybridization assay. The term interact is also meant to include “binding” interactions between molecules. Interactions may be, for example, protein-protein, protein-nucleic acid, protein-small molecule or small molecule-nucleic acid in nature. The term “interaction” when used in the context of a statistical relationship or analysis, refers to a means for demonstrating the underlying effect of haplotypes, e.g., the combined effect of SNPs at different loci that are in LD.

[0111] The term “intronic sequence” or “intronic nucleotide sequence” refers to the nucleotide sequence of an intron or portion thereof.

[0112] The term “isolated” as used herein with respect to nucleic acids, such as DNA or RNA, refers to molecules separated from other DNAs or RNAs, respectively, that are present in the natural source of the macromolecule. The term isolated as used herein also refers to a nucleic acid or peptide that is substantially free of cellular material, viral material, or culture medium when produced by recombinant DNA techniques, or chemical precursors or other chemicals when chemically synthesized. Moreover, an “isolated nucleic acid” is meant to include nucleic acid fragments which are not naturally occurring as fragments and would not be found in the natural state. The term “isolated” is also used herein to refer to polypeptides which are isolated from other cellular proteins and is meant to encompass both purified and recombinant polypeptides.

[0113] The term “lipid” refers to a fat or fat-like substance that is insoluble in polar solvents such as water. The term “lipid” is intended to include true fats (e.g. esters of fatty acids and glycerol); lipids (phospholipids, cerebrosides, waxes); sterols (cholesterol, ergosterol) and lipoproteins (e.g. HDL, LDL and VLDL).

[0114] The term “linkage disequilibrium,” also referred to herein as “LD,” refers to a greater than random association between specific alleles at two marker loci within a particular population. In general, linkage disequilibrium decreases with an increase in physical distance. If linkage disequilibrium exists between two markers, then the genotypic information at one marker can be used to make probabilistic predictions about the genotype of the second marker.

[0115] The term “locus” refers to a specific position in a chromosome.

[0116] The term “modulation” as used herein refers to both upregulation, (i.e., activation or stimulation), for example by agonizing; and downregulation (i.e., inhibition or suppression), for example by antagonizing of a bioactivity (e.g. expression of a gene).

[0117] The term “molecular structure” of a gene or a portion thereof refers to the structure as defined by the nucleotide content (including deletions, substitutions, additions of one or more nucleotides), the nucleotide sequence, the state of methylation, and/or any other modification of the gene or portion thereof.

[0118] The term “mutated gene” refers to an allelic form of a gene that differs from the predominant form in a population. A mutated gene is capable of altering the phenotype of a subject having the mutated gene relative to a subject having the predominant form of the gene. If a subject must be homozygous for this mutation to have an altered phenotype, the mutation is said to be recessive. If one copy of the mutated gene is sufficient to alter the phenotype of the subject, the mutation is said to be dominant. If a subject has one copy of the mutated gene and has a phenotype that is intermediate between that of a homozygous and that of a heterozygous subject (for that gene), the mutation is said to be co-dominant.

[0119] As used herein, the term “nucleic acid” refers to polynucleotides such as deoxyribonucleic acid (DNA), and, where appropriate, ribonucleic acid (RNA). The term should also be understood to include, as equivalents, derivatives, variants and analogs of either RNA or DNA made from nucleotide analogs, and, as applicable to the embodiment being described, single (sense or antisense) and double-stranded polynucleotides. Deoxyribonucleotides include deoxyadenosine, deoxycytidine, deoxyguanosine, and deoxythymidine. For purposes of clarity, when referring herein to a nucleotide of a nucleic acid, which can be DNA or an RNA, the terms “adenine”, “cytidine”, “guanine”, and “thymidine” and/or “A”, “C”, “G”, and “T”, respectively, are used. It is understood that if the nucleic acid is RNA, a nucleotide having a uracil base is uridine.

[0120] The term “nucleotide sequence complementary to the nucleotide sequence set forth in SEQ ID NO: N” refers to the nucleotide sequence of the complementary strand of a nucleic acid strand having SEQ ID NO: N. The term “complementary strand” is used herein interchangeably with the term “complement.” The complement of a nucleic acid strand can be the complement of a coding strand or the complement of a non-coding strand. When referring to double stranded nucleic acids, the complement of a nucleic acid having SEQ ID NO: N refers to the complementary strand of the strand having SEQ ID NO: N or to any nucleic acid having the nucleotide sequence of the complementary strand of SEQ ID NO: N. When referring to a single stranded nucleic acid having the nucleotide sequence SEQ ID NO: N, the complement of this nucleic acid is a nucleic acid having a nucleotide sequence which is complementary to that of SEQ ID NO: N. The nucleotide sequences and complementary sequences thereof are always given in the 5′ to 3′ direction. The term “complement” and “reverse complement” are used interchangeably herein.

[0121] A “non-human animal” of the invention can include mammals such as rodents, non-human primates, sheep, goats, horses, dogs, cows, chickens, amphibians, reptiles, etc. Preferred non-human animals are selected from the rodent family including rat and mouse, most preferably mouse, though transgenic amphibians, such as members of the Xenopus genus, and transgenic chickens can also provide important tools for understanding and identifying agents which can affect, for example, embryogenesis and tissue formation. The term “chimeric animal” is used herein to refer to animals in which an exogenous sequence is found, or in which an exogenous sequence is expressed in some but not all cells of the animal. The term “tissue-specific chimeric animal” indicates that an exogenous sequence is present and/or expressed or disrupted in some tissues, but not others.

[0122] The term “oligonucleotide” is intended to include and single- or double stranded DNA or RNA. Oligonucleotides can be naturally occurring or synthetic, but are typically prepared by synthetic means. Preferred oligonucleotides of the invention include segments of a gene listed in Tables 1-5 or their complements, which include and/or flank any one of the polymorphic sites shown in Tables 1-5. The segments can be between 5 and 250 bases, and, in specific embodiments, are between 5-10, 5-20, 10-20, 10-50, 20-50 or 10-100 bases. For example, the segments can be 21 bases. The polymorphic site can occur within any position of the segment or a region next to the segment. The segments can be from any of the allelic forms of the gene sequences shown in Tables 1-5.

[0123] The term “operably-linked” is intended to mean that the 5′ upstream regulatory element is associated with a nucleic acid in such a manner as to facilitate transcription of the nucleic acid from the 5′ upstream regulatory element.

[0124] The term “polymorphism” refers to the coexistence of more than one form of a gene or portion thereof. A portion of a gene of which there are at least two different forms, i.e., two different nucleotide sequences, is referred to as a “polymorphic region of a gene.” A polymorphic locus can be a single nucleotide, the identity of which differs in the other alleles. A polymorphic locus can also be more than one nucleotide long. The allelic form occurring most frequently in a selected population is often referred to as the reference and/or wildtype form. Other allelic forms are typically designated or alternative or variant alleles. Diploid organisms may be homozygous or heterozygous for allelic forms. A diallelic or biallelic polymorphism has two forms. A trialleleic polymorphism has three forms.

[0125] A “polymorphic gene” refers to a gene having at least one polymorphic region.

[0126] The term “primer” as used herein, refers to a single-stranded oligonucleotide which acts as a point of initiation of template-directed DNA synthesis under appropriate conditions (e.g., in the presence of four different nucleoside triphosphates and as agent for polymerization, such as DNA or RNA polymerase or reverse transcriptase) in an appropriate buffer and at a suitable temperature. The length of a primer may vary but typically ranges from 15 to 30 nucleotides. A primer need not match the exact sequence of a template, but must be sufficiently complementary to hybridize with the template.

[0127] The term “primer pair” refers to a set of primers including an upstream primer that hybridizes with the 3′ end of the complement of the DNA sequence to be amplified and a downstream primer that hybridizes with the 3′ end of the sequence to be amplified.

[0128] The terms “protein”, “polypeptide” and “peptide” are used interchangeably herein when referring to a gene product.

[0129] The term “recombinant protein” refers to a polypeptide which is produced by recombinant DNA techniques, wherein generally, DNA encoding the polypeptide is inserted into a suitable expression vector which is in turn used to transform a host cell to produce the heterologous protein.

[0130] A “regulatory element”, also termed herein “regulatory sequence” is intended to include elements which are capable of modulating transcription from a 5′ upstream regulatory sequence, including, but not limited to a basic promoter, and include elements such as enhancers and silencers. The term “enhancer”, also referred to herein as “enhancer element”, is intended to include regulatory elements capable of increasing, stimulating, or enhancing transcription from a 5′ upstream regulatory element, including a basic promoter. The term “silencer”, also referred to herein as “silencer element” is intended to include regulatory elements capable of decreasing, inhibiting, or repressing transcription from a 5′ upstream regulatory element, including a basic promoter. Regulatory elements are typically present in 5′ flanking regions of genes. Regulatory elements also may be present in other regions of a gene, such as introns. Thus, it is possible that a gene has regulatory elements located in introns, exons, coding regions, and 3′ flanking sequences. Such regulatory elements are also intended to be encompassed by the present invention and can be identified by any of the assays that can be used to identify regulatory elements in 5′ flanking regions of genes.

[0131] The term “regulatory element” further encompasses “tissue specific” regulatory elements, i.e., regulatory elements which effect expression of an operably linked DNA sequence preferentially in specific cells (e.g., cells of a specific tissue). gene expression occurs preferentially in a specific cell if expression in this cell type is significantly higher than expression in other cell types. The term “regulatory element” also encompasses non-tissue specific regulatory elements, i.e., regulatory elements which are active in most cell types. Furthermore, a regulatory element can be a constitutive regulatory element, i.e., a regulatory element which constitutively regulates transcription, as opposed to a regulatory element which is inducible, i.e., a regulatory element which is active primarily in response to a stimulus. A stimulus can be, e.g., a molecule, such as a protein, hormone, cytokine, heavy metal, phorbol ester, cyclic AMP (cAMP), or retinoic acid.

[0132] Regulatory elements are typically bound by proteins, e.g., transcription factors. The term “transcription factor” is intended to include proteins or modified forms thereof, which interact preferentially with specific nucleic acid sequences, i.e., regulatory elements, and which in appropriate conditions stimulate or repress transcription. Some transcription factors are active when they are in the form of a monomer. Alternatively, other transcription factors are active in the form of a dimer consisting of two identical proteins or different proteins (heterodimer). Modified forms of transcription factors are intended to refer to transcription factors having a postranslational modification, such as the attachment of a phosphate group. The activity of a transcription factor is frequently modulated by a postranslational modification. For example, certain transcription factors are active only if they are phosphorylated on specific residues. Alternatively, transcription factors can be active in the absence of phosphorylated residues and become inactivated by phosphorylation. A list of known transcription factors and their DNA binding site can be found, e.g., in public databases, e.g., TFMATRIX Transcription Factor Binding Site Profile database.

[0133] The term “single nucleotide polymorphism” (SNP) refers to a polymorphic site occupied by a single nucleotide, which is the site of variation between allelic sequences. The site is usually preceded by and followed by highly conserved sequences of the allele (e.g., sequences that vary in less than 1/100 or 1/1000 members of a population). A SNP usually arises due to substitution of one nucleotide for another at the polymorphic site. SNPs can also arise from a deletion of a nucleotide or an insertion of a nucleotide relative to a reference allele. Typically the polymorphic site is occupied by a base other than the reference base. For example, where the reference allele contains the base “T” (thymidine) at the polymorphic site, the altered allele can contain a “C” (cytidine), “G” (guanine), or “A” (adenine) at the polymorphic site.

[0134] SNP's may occur in protein-coding nucleic acid sequences, in which case they may give rise to a defective or otherwise variant protein, or genetic disease. Such a SNP may alter the coding sequence of the gene and therefore specify another amino acid (a “missense” SNP) or a SNP may introduce a stop codon (a “nonsense” SNP). When a SNP does not alter the amino acid sequence of a protein, the SNP is called “silent.” SNP's may also occur in noncoding regions of the nucleotide sequence. This may result in defective protein expression, e.g., as a result of alternative spicing, or it may have no effect.

[0135] As used herein, the term “specifically hybridizes” or “specifically detects” refers to the ability of a nucleic acid molecule of the invention to hybridize to at least approximately 6, 12, 20, 30, 40, 50, 60, 70, 80, 90, 100, 110, 120, 130 or 140 consecutive nucleotides of either strand of a gene listed in Tables 1-5.

[0136] As used herein, the term “transfection” means the introduction of a nucleic acid, e.g., an expression vector, into a recipient cell by nucleic acid-mediated gene transfer. The term “transduction” is generally used herein when the transfection with a nucleic acid is by viral delivery of the nucleic acid. “Transformation”, as used herein, refers to a process in which a cell's genotype is changed as a result of the cellular uptake of exogenous DNA or RNA, and, for example, the transformed cell expresses a recombinant form of a polypeptide or, in the case of anti-sense expression from the transferred gene, the expression of a naturally-occurring form of the recombinant protein is disrupted.

[0137] As used herein, the term “transgene” refers to a nucleic acid sequence which has been genetic-engineered into a cell. Daughter cells deriving from a cell in which a transgene has been introduced are also said to contain the transgene (unless it has been deleted). A transgene can encode, e.g., a polypeptide, or an antisense transcript, partly or entirely heterologous, i.e., foreign, to the transgenic animal or cell into which it is introduced, or, is homologous to an endogenous gene of the transgenic animal or cell into which it is introduced, but which is designed to be inserted, or is inserted, into the animal's genome in such a way as to alter the genome of the cell into which it is inserted (e.g., it is inserted at a location which differs from that of the natural gene or its insertion results in a knockout). Alternatively, a transgene can also be present in an episome. A transgene can include one or more transcriptional regulatory sequence and any other nucleic acid, (e.g. intron), that may be necessary for optimal expression of a selected nucleic acid.

[0138] A “transgenic animal” refers to any animal, preferably a non-human animal, e.g. a mammal, bird or an amphibian, in which one or more of the cells of the animal contain heterologous nucleic acid introduced by genetic engineering, such as by transgenic techniques well known in the art. The nucleic acid is introduced into the cell, directly or indirectly by introduction into a precursor of the cell, by way of deliberate genetic manipulation, such as by microinjection or by infection with a recombinant virus. The term genetic manipulation does not include classical cross-breeding, or in vitro fertilization, but rather is directed to the introduction of a recombinant DNA molecule. This molecule may be integrated within a chromosome, or it may be extrachromosomally replicating DNA. In the typical transgenic animals described herein, the transgene causes cells to express a recombinant form of one of a protein, e.g. either agonistic or antagonistic forms. However, transgenic animals in which the recombinant gene is silent are also contemplated, as for example, the FLP or CRE recombinase dependent constructs described below. Moreover, “transgenic animal” also includes those recombinant animals in which gene disruption of one or more genes is caused by human intervention, including both recombination and antisense techniques.

[0139] The term “treatment,” or “treating” as used herein, is defined as the application or administration of a therapeutic agent to a subject, implementation of lifestyle changes (e.g., changes in diet or environment), administration of medication, e.g. lipid modulating medication, use of medical devices, such as, but not limited to, stents, defibrillators, and angioplasty devices, or any combination thereof or surgical procedures such as percutaneous transluminal coronary balloon angioplasty (PTCA) or laser angioplasty, defibrillators, implantation of a stent, or other surgical intervention, such as, for example, coronary bypass grafting (CABG), or any combination thereof, or application or administration of a therapeutic agent to an isolated tissue or cell line from a subject, who has a disease or disorder, a symptom of disease or disorder or a predisposition toward a disease or disorder, with the purpose to cure, heal, alleviate, relieve, alter, remedy, ameliorate, improve or affect the disease or disorder, the symptoms of the disease or disorder, or the predisposition toward disease. The medical devices described in the methods of the invention can also be used in combination with a modulator of gene expression or polypeptide activity. “Modulators of gene expression,” as used herein include, for example, nucleic acid molecules, antisense nucleic acid molecules, ribozymes, or a small molecules. “Modulators of polypeptide activity” include, for example, antibodies or proteins or polypeptides.

[0140] As used herein, the term “vector” refers to a nucleic acid molecule capable of transporting or replicating another nucleic acid to which it has been linked. One type of preferred vector is an episome, i.e., a nucleic acid capable of extra-chromosomal replication. Preferred vectors are those capable of autonomous replication and/or expression of nucleic acids to which they are linked. Vectors capable of directing the expression of genes to which they are operatively-linked are referred to herein as “expression vectors”. In general, expression vectors of utility in recombinant DNA techniques are often in the form of “plasmids” which refer generally to circular double stranded DNA circles which, in their vector form are not physically linked to the host chromosome. In the present specification, “plasmid” and “vector” are used interchangeably as the plasmid is the most commonly used form of vector. However, the invention is intended to include such other forms of expression vectors which serve equivalent functions and which become known in the art subsequently hereto.

[0141] Polymorphisms of the Invention

[0142] The nucleic acid molecules of the present invention include specific allelic variants of the genes in Tables 1-5, which differ from the respective reference sequence, or at least a portion thereof, having a polymorphic region. The preferred nucleic acid molecules of the present invention comprise sequences having the polymorphisms shown in Table 5, and those in linkage disequilibrium therewith. The invention further comprises isolated nucleic acid molecules complementary to nucleic acid molecules comprising the polymorphisms of the present invention. Nucleic acid molecules of the present invention can function as probes or primers, e.g., in methods for determining the allelic identity of a polymorphic region of the genes identified in Tables 1-5. The nucleic acids of the invention can also be used, either in combination with each other or in combination with other SNPs in these genes or other genes, to determine whether a subject is or is not at risk of developing a disease associated with a specific allelic variant of a polymorphic region of a gene identified in Tables 1-5, e.g., an abnormal lipid level. The nucleic acids of the invention can further be used to prepare or express polypeptides encoded by specific alleles of the genes identified in Tables 1-5, such as mutant alleles. Such nucleic acids can be used in gene therapy. Polypeptides encoded by specific alleles, such as mutant polypeptides, can also be used in therapy or for preparing reagents, e.g., antibodies, for detecting proteins encoded by these alleles. Accordingly, such reagents can be used to detect mutant proteins encoded by the genes identified in Tables 1-5.

[0143] As described herein, allelic variants of the human genes listed in Tables 1-5 which are associated with abnormal lipid levels have been identified. The invention is intended to encompass the allelic variants as well as those in linkage disequilibrium which can be identified, e.g., according to the methods described herein (see, for example, the SNPs listed in Table 4).

[0144] The invention also provides isolated nucleic acids comprising at least one polymorphic region of a gene listed in Tables 1 having a nucleotide sequence which differs from the reference nucleotide sequence. Preferred nucleic acids can have a polymorphic region in an upstream regulatory element, an exon, an intron, or in the 3′ UTR.

[0145] The nucleic acid molecules of the invention can be single stranded DNA (e.g., an oligonucleotide), double stranded DNA (e.g., double stranded oligonucleotide) or RNA. Preferred nucleic acid molecules of the invention can be used as probes or primers. Primers of the invention refer to nucleic acids which hybridize to a nucleic acid sequence which is adjacent to the region of interest or which covers the region of interest and is extended. As used herein, the term “hybridizes” is intended to describe conditions for hybridization and washing under which nucleotide sequences that are significantly identical or homologous to each other remain hybridized to each other. Preferably, the conditions are such that sequences at least about 70%, more preferably at least about 80%, even more preferably at least about 85% or 90% identical to each other remain hybridized to each other. Such stringent conditions vary according to the length of the involved nucleotide sequence but are known to those skilled in the art and can be found or determined based on teachings in Current Protocols in Molecular Biology, Ausubel et al., eds., John Wiley & Sons, Inc. (1995), sections 2, 4 and 6. Additional stringent conditions and formulas for determining such conditions can be found in Molecular Cloning: A Laboratory Manual, Sambrook et al., Cold Spring Harbor Press, Cold Spring Harbor, N.Y. (1989), chapters 7, 9 and 11. A preferred, non-limiting example of stringent hybridization conditions for hybrids that are at least basepairs in length includes hybridization in 4× sodium chloride/sodium citrate (SSC), at about 65-70° C. (or hybridization in 4×SSC plus 50% formamide at about 42-50° C.) followed by one or more washes in 1×SSC, at about 65-70° C. A preferred, non-limiting example of highly stringent hybridization conditions for such hybrids includes hybridization in 1×SSC, at about 65-70° C. (or hybridization in 1×SSC plus 50% formamide at about 42-50° C.) followed by one or more washes in 0.3×SSC, at about 65-70° C. A preferred, non-limiting example of reduced stringency hybridization conditions for such hybrids includes hybridization in 4×SSC, at about 50-60° C. (or alternatively hybridization in 6×SSC plus 50% formamide at about 40-45° C.) followed by one or more washes in 2×SSC, at about 50-60° C. Ranges intermediate to the above-recited values, e.g., at 65-70° C. or at 42-50° C. are also intended to be encompassed by the present invention. SSPE (1×SSPE is 0.15M NaCl, 10 mM NaH₂PO₄, and 1.25 mM EDTA, pH 7.4) can be substituted for SSC (1×SSC is 0.15M NaCl and 15 mM sodium citrate) in the hybridization and wash buffers; washes are performed for 15 minutes each after hybridization is complete.

[0146] The hybridization temperature for hybrids anticipated to be less than 50 base pairs in length should be 5-10° C. less than the melting temperature (Tₘ) of the hybrid, where Tₘ is determined according to the following equations. For hybrids less than 18 base pairs in length, Tₘ(° C.)=2(# of A+T bases)+4(# of G+C bases). For hybrids between 18 and 49 base pairs in length, Tₘ(° C.)=81.5+16.6(log₁₀[Na⁺])+0.41(% G+C)−(600/N), where N is the number of bases in the hybrid, and [Na⁺] is the concentration of sodium ions in the hybridization buffer ([Na⁺] for 1×SSC=0.165 M). It will also be recognized by the skilled practitioner that additional reagents may be added to hybridization and/or wash buffers to decrease non-specific hybridization of nucleic acid molecules to membranes, for example, nitrocellulose or nylon membranes, including but not limited to blocking agents (e.g., BSA or salmon or herring sperm carrier DNA), detergents (e.g., SDS), chelating agents (e.g., EDTA), Ficoll, PVP and the like. When using nylon membranes, in particular, an additional preferred, non-limiting example of stringent hybridization conditions is hybridization in 0.25-0.5M NaH₂PO₄, 7% SDS at about 65° C., followed by one or more washes at 0.02M NaH₂PO₄, 1% SDS at 65° C., see e.g., Church and Gilbert (1984) Proc. Natl. Acad. Sci. USA 81:1991-1995, (or alternatively 0.2×SSC, 1% SDS).

[0147] A primer or probe can be used alone in a detection method, or a primer can be used together with at least one other primer or probe in a detection method. Primers can also be used to amplify at least a portion of a nucleic acid. Probes of the invention refer to nucleic acids which hybridize to the region of interest and which are not further extended. For example, a probe is a nucleic acid which specifically hybridizes to a polymorphic region of a gene listed in Tables 1-5, and which by hybridization or absence of hybridization to the DNA of a subject or the type of hybrid formed will be indicative of the identity of the allelic variant of the polymorphic region of the gene.

[0148] Numerous procedures for determining the nucleotide sequence of a nucleic acid molecule, or for determining the presence of mutations in nucleic acid molecules include a nucleic acid amplification step, which can be carried out by, e.g., polymerase chain reaction (PCR). Accordingly, in one embodiment, the invention provides primers for amplifying portions of a gene listed in Tables 1-5, such as portions of exons and/or,portions of introns. In a preferred embodiment, the exons and/or sequences adjacent to the exons of a human gene listed in Tables 1-5 will be amplified to, e.g., detect which allelic variant, if any, of a polymorphic region is present in the gene of a subject. Preferred primers comprise a nucleotide sequence complementary to a specific allelic variant of a polymorphic region of a gene listed in Tables 1-5 and of sufficient length to selectively hybridize with a gene listed in Tables 1-5, or a combination thereof. In a preferred embodiment, the primer, e.g., a substantially purified oligonucleotide, comprises a region having a nucleotide sequence which hybridizes under stringent conditions to about 6, 8, 10, or 12, preferably 25, 30, 40, 50, or 75 consecutive nucleotides of a gene listed in Tables 1-5. In an even more preferred embodiment, the primer is capable of hybridizing to a nucleotide sequence of a gene listed in Tables 1-5, complements thereof, allelic variants thereof, or complements of allelic variants thereof. For example, primers comprising a nucleotide sequence of at least about 15 consecutive nucleotides, at least about 25 nucleotides or having from about 15 to about 20 nucleotides set forth in SEQ ID NOs: 1-26, or the complement thereof are provided by the invention. Primers having a sequence of more than about 25 nucleotides are also within the scope of the invention. Preferred primers of the invention are primers that can be used in PCR for amplifying each of the exons of a gene listed in Tables 1-5.

[0149] Primers can be complementary to nucleotide sequences located close to each other or further apart, depending on the use of the amplified DNA. For example, primers can be chosen such that they amplify DNA fragments of at least about 10 nucleotides or as much as several kilobases. Preferably, the primers of the invention will hybridize selectively to nucleotide sequences located about 150 to about 350 nucleotides apart.

[0150] For amplifying at least a portion of a nucleic acid, a forward primer (i.e., 5′ primer) and a reverse primer (i.e., 3′ primer) will preferably be used. Forward and reverse primers hybridize to complementary strands of a double stranded nucleic acid, such that upon extension from each primer, a double stranded nucleic acid is amplified. A forward primer can be a primer having a nucleotide sequence or a portion of a nucleotide sequence shown in Tables 1-5 (SEQ ID NOs: 1-26). A reverse primer can be a primer having a nucleotide sequence or a portion of the nucleotide sequence that is complementary to a nucleotide sequence shown in Tables 1-5 (SEQ ID NOs: 1-26).

[0151] Yet other preferred primers of the invention are nucleic acids which are capable of selectively hybridizing to an allelic variant of a polymorphic region of a gene listed in Tables 1-5. Thus, such primers can be specific for the sequence of a gene listed in Tables 1-5, so long as they have a nucleotide sequence which is capable of hybridizing to a gene listed in Tables 1-5. Preferred primers are capable of specifically hybridizing to the allelic variants listed in Tables 1-5 (SEQ ID NOs: 1-26). Such primers can be used, e.g., in sequence specific oligonucleotide priming as described further herein.

[0152] Other preferred primers used in the methods of the invention are nucleic acids which are capable of hybridizing to the reference sequence of a gene listed in Tables 1-5, thereby detecting the presence of the reference allele of an allelic variant or the absence of a variant allele of an allelic variant in a gene listed in Tables 1-5. Such primers can be used in combination, e.g., primers specific for the variant polynucleotide of a gene listed in Tables 1-5 can be used in combination. The sequences of primers specific for the reference sequences comprising a gene listed in Tables 1-5 will be readily apparent to one of skill in the art.

[0153] The nucleic acids of the invention can also be used as probes, e.g., in therapeutic and diagnostic assays. For instance, the present invention provides a probe comprising a substantially purified oligonucleotide, which oligonucleotide comprises a region having a nucleotide sequence that is capable of hybridizing specifically to a region of a gene listed in Tables 1-5 which is polymorphic (SEQ ID NOs: 1-26). In an even more preferred embodiment of the invention, the probes are capable of hybridizing specifically to one allelic variant of a gene listed in Tables 1-5 having a nucleotide sequence which differs from the nucleotide sequence set forth in the corresponding reference sequence. Such probes can then be used to specifically detect which allelic variant of a polymorphic region of a gene listed in Tables 1-5 is present in a subject. The polymorphic region can be located in the 3′ UTR, 5′ upstream regulatory element, exon, or intron sequences of a gene listed in Tables 1-5.

[0154] Particularly, preferred probes of the invention have a number of nucleotides sufficient to allow specific hybridization to the target nucleotide sequence. Where the target nucleotide sequence is present in a large fragment of DNA, such as a genomic DNA fragment of several tens or hundreds of kilobases, the size of the probe may have to be longer to provide sufficiently specific hybridization, as compared to a probe which is used to detect a target sequence which is present in a shorter fragment of DNA. For example, in some diagnostic methods, a portion of a gene listed in Tables 1-5 may first be amplified and thus isolated from the rest of the chromosomal DNA and then hybridized to a probe. In such a situation, a shorter probe will likely provide sufficient specificity of hybridization. For example, a probe having a nucleotide sequence of about 10 nucleotides may be sufficient.

[0155] In preferred embodiments, the probe or primer further comprises a label attached thereto, which, e.g., is capable of being detected, e.g. the label group is selected from amongst radioisotopes, fluorescent compounds, enzymes, and enzyme co-factors.

[0156] In a preferred embodiment of the invention, the isolated nucleic acid, which is used, e.g., as a probe or a primer, is modified, so as to be more stable than naturally occurring nucleotides. Exemplary nucleic acid molecules which are modified include phosphoramidate, phosphothioate and methylphosphonate analogs of DNA (see also U.S. Pat. Numbers 5,176,996; 5,264,564; and 5,256,775).

[0157] The nucleic acids of the invention can also be modified at the base moiety, sugar moiety, or phosphate backbone, for example, to improve stability of the molecule. The nucleic acids, e.g., probes or primers, may include other appended groups such as peptides (e.g., for targeting host cell receptors in vivo), or agents facilitating transport across the cell membrane (see, e.g., Letsinger et al., 1989, Proc. Natl. Acad. Sci. U.S.A. 86:6553-6556; Lemaitre et al., 1987, Proc. Natl. Acad. Sci. 84:648-652; PCT Publication No. WO88/09810, published Dec. 15, 1988), hybridization-triggered cleavage agents. (See, e.g., Krol et al., 1988, BioTechniques 6:958-976) or intercalating agents (see, e.g., Zon, 1988, Pharm. Res. 5:539-549). To this end, the nucleic acid of the invention may be conjugated to another molecule, e.g., a peptide, hybridization triggered cross-linking agent, transport agent, hybridization-triggered cleavage agent, etc.

[0158] The isolated nucleic acid comprising an intronic sequence of a gene listed in Tables 1-5 may comprise at least one modified base moiety which is selected from the group including but not limited to 5-fluorouracil, 5-bromouracil, 5-chlorouracil, 5-iodouracil, hypoxanthine, xantine, 4-acetylcytidine, 5-(carboxyhydroxymethyl) uracil, 5-carboxymethylaminomethyl-2-thiouridine, 5-carboxymethylaminomethyluracil, dihydrouracil, beta-D-galactosylqueosine, inosine, N6-isopentenyladenine, 1-methylguanine, 1-methylinosine, 2,2-dimethylguanine, 2-methyladenine, 2-methylguanine, 3-methylcytidine, 5-methylcytidine, N6-adenine, 7-methylguanine, 5-methylaminomethyluracil, 5-methoxyaminomethyl-2-thiouracil, beta-D-mannosylqueosine, 5′-methoxycarboxymethyluracil, 5-methoxyuracil, 2-methylthio-N6-isopentenyladenine, uracil-5-oxyacetic acid (v), wybutoxosine, pseudouracil, queosine, 2-thiocytidine, 5-methyl-2-thiouracil, 2-thiouracil, 4-thiouracil, 5-methyluracil, uracil-5-oxyacetic acid methylester, uracil-5-oxyacetic acid (v), 5-methyl-2-thiouracil, 3-(3-amino-3-N-2-carboxypropyl) uracil, (acp3)w, and 2,6-diaminopurine.

[0159] The isolated nucleic acid may also comprise at least one modified sugar moiety selected from the group including but not limited to arabinose, 2-fluoroarabinose, xylulose, and hexose.

[0160] In yet another embodiment, the nucleic acid comprises at least one modified phosphate backbone selected from the group consisting of a phosphorothioate, a phosphorodithioate, a phosphoramidothioate, a phosphoramidate, a phosphordiamidate, a methylphosphonate, an alkyl phosphotriester, and a formacetal or analog thereof.

[0161] In yet a further embodiment, the nucleic acid is an α-anomeric oligonucleotide. An α-anomeric oligonucleotide forms specific double-stranded hybrids with complementary RNA in which, contrary to the usual β-units, the strands run parallel to each other (Gautier et al., 1987, Nucl. Acids Res. 15:6625-6641). The oligonucleotide is a 2′-0-methylribonucleotide (Inoue et al., 1987, Nucl. Acids Res. 15:6131-6148), or a chimeric RNA-DNA analogue (Inoue et al., 1987, FEBS Lett. 215:327-330).

[0162] Any nucleic acid fragment of the invention can be prepared according to methods well known in the art and described, e.g., in Sambrook, J. Fritsch, E. F., and Maniatis, T. (1989) Molecular Cloning: A Laboratory Manual, Cold Spring Harbor Laboratory Press, Cold Spring Harbor, N.Y. For example, discrete fragments of the DNA can be prepared and cloned using restriction enzymes. Alternatively, discrete fragments can be prepared using the Polymerase Chain Reaction (PCR) using primers having an appropriate sequence.

[0163] Oligonucleotides of the invention may be synthesized by standard methods known in the art, e.g. by use of an automated DNA synthesizer (such as are commercially available from Biosearch, Applied Biosystems, etc.). As examples, phosphorothioate oligonucleotides may be synthesized by the method of Stein et al. (1988, Nucl. Acids Res. 16:3209), methylphosphonate oligonucleotides can be prepared by use of controlled pore glass polymer supports (Sarin et al., 1988, Proc. Natl. Acad Sci. U.S.A. 85:7448-7451), etc.

[0164] The invention also provides vectors and plasmids comprising the nucleic acids of the invention. For example, in one embodiment, the invention provides a vector comprising at least a portion of a gene listed in Tables 1-5 comprising a polymorphic region. Thus, the invention provides vectors for expressing at least a portion of the newly identified allelic variants of the human genes listed in Tables 1-5, as well as other allelic variants, comprising a nucleotide sequence which is different from the nucleotide sequences disclosed in the reference sequences. The allelic variants can be expressed in eukaryotic cells, e.g., cells of a subject, e.g., a mammalian subject, or in prokaryotic cells.

[0165] In one embodiment, the vector comprising at least a portion of an allele is introduced into a host cell, such that a protein encoded by the allele is synthesized. The protein produced can be used, e.g., for the production of antibodies, which can be used, e.g., in methods for detecting mutant forms of proteins encoded by the genes listed in Tables 1-5. Alternatively, the vector can be used for gene therapy, and be, e.g., introduced into a subject to produce protein. Host cells comprising a vector having at least a portion of a gene listed in Tables 1-5 are also within the scope of the invention.

[0166] Polypeptides of the invention

[0167] The present invention provides isolated polypeptides encoded by the genes listed in Tables 1-5, such as polypeptides which are encoded by specific allelic variants of these genes.

[0168] In one embodiment, the polypeptides encoded by the genes listed in Tables 1-5 are isolated from, or otherwise substantially free of other cellular proteins. The term “substantially free of other cellular proteins” (also referred to herein as “contaminating proteins”) or “substantially pure or purified preparations” are defined as encompassing preparations of polypeptides encoded by the genes listed in Tables 1-5 having less than about 20% (by dry weight) contaminating protein, and preferably having less than about 5% contaminating protein. It will be appreciated that functional forms of the subject polypeptides can be prepared, for the first time, as purified preparations by using a cloned gene as described herein.

[0169] Preferred proteins of the invention have an amino acid sequence which is at least about 60%, 70%, 80%, 85%, 90%, or 95% identical or homologous to the amino acid sequence of the proteins encoded by the genes listed in Tables 1-5. Even more preferred proteins comprise an amino acid sequence which is at least about 95%, 96%, 97%, 98%, or 99% homologous or identical to polypeptides encoded by the genes listed in Tables 1-5. Such proteins can be recombinant proteins, and can be, e.g., produced in vitro from nucleic acids comprising a specific allele of a polymorphic region. For example, recombinant polypeptides preferred by the present invention can be encoded by a nucleic acid which comprises a sequence which is at least 85% homologous and more preferably 90% homologous and most preferably 95% homologous with a reference nucleotide sequence of a gene listed in Tables 1-5, as set forth herein, and comprises an allele of a polymorphic region that differs from that set forth in Tables 1-5. Polypeptides which are encoded by a nucleic acid comprising a sequence that is at least about 98-99% homologous with a reference nucleotide sequence of a gene listed in Tables 1-5 and comprises an allele of a polymorphic region that differs from that set forth in a reference nucleotide sequence of a gene listed in Tables 1-5 are also within the scope of the invention.

[0170] In a preferred embodiment, a protein of the present invention is a mammalian protein. In an even more preferred embodiment, the protein is a human protein.

[0171] The invention also provides peptides that preferably are capable of functioning in one of either role of an agonist or antagonist of at least one biological activity of a wild-type (“normal”) protein encoded by a gene listed in Tables 1-5. The term “evolutionarily related to,” with respect to amino acid sequences of proteins encoded by the genes listed in Tables 1-5, refers to both polypeptides having amino acid sequences found in human populations, and also to artificially produced mutational variants of human polypeptides encoded by the genes listed in Tables 1-5 which are derived, for example, by combinatorial mutagenesis.

[0172] Full length proteins or fragments corresponding to one or more particular motifs and/or domains or to arbitrary sizes, for example, at least 5, 10, 25, 50, 75 and 100, amino acids in length of proteins encoded by the genes listed in Tables 1-5 are within the scope of the present invention.

[0173] Isolated peptides or polypeptides encoded by the genes listed in Tables 1-5 can be obtained by screening peptides recombinantly produced from the corresponding fragment of the nucleic acid encoding such peptides. In addition, such peptides and polypeptides can be chemically synthesized using techniques known in the art such as conventional Merrifield solid phase f-Moc or t-Boc chemistry. For example, an peptide or polypeptide of the present invention may be arbitrarily divided into fragments of desired length with no overlap of the fragments, or preferably divided into overlapping fragments of a desired length. The fragments can be produced (recombinantly or by chemical synthesis) and tested to identify those peptides or polypeptides which can function as either agonists or antagonists of a wild-type (e.g., “normal”) protein encoded by a gene listed in Tables 1-5.

[0174] In general, peptides and polypeptides referred to herein as having an activity (e.g., are “bioactive”) of a protein encoded by a gene listed in Tables 1-5 are defined as peptides and polypeptides which mimic or antagonize all or a portion of the biological/biochemical activities of a protein encoded by a gene listed in Tables 1-5, such as the ability to bind ligands. Other biological activities of the subject proteins are described herein or will be reasonably apparent to those skilled in the art. According to the present invention, a peptide or polypeptide has biological activity if it is a specific agonist or antagonist of a naturally-occurring form of a protein encoded by a gene listed in Tables 1-5.

[0175] Assays for determining whether a protein encoded by a gene listed in Tables 1-5 or variant thereof, has one or more biological activities are well known in the art.

[0176] Other preferred proteins of the invention are those encoded by the nucleic acids set forth in the section pertaining to nucleic acids of the invention. In particular, the invention provides fusion proteins, e.g., immunoglobulin fusion proteins comprising a protein encoded by a gene listed in Tables 1-5. Such fusion proteins can provide, e.g., enhanced stability and solubility of a protein encoded by a gene listed in Tables 1-5 and may thus be useful in therapy. Fusion proteins can also be used to produce an immunogenic fragment of a protein encoded by a gene listed in Tables 1-5. For example, the VP6 capsid protein of rotavirus can be used as an immunologic carrier protein for portions of a polypeptide, either in the monomeric form or in the form of a viral particle. The nucleic acid sequences corresponding to the portion of a subject protein to which antibodies are to be raised can be incorporated into a fusion gene construct which includes coding sequences for a late vaccinia virus structural protein to produce a set of recombinant viruses expressing fusion proteins comprising epitopes of a protein encoded by a gene listed in Tables 1-5 as part of the virion. It has been demonstrated with the use of immunogenic fusion proteins utilizing the Hepatitis B surface antigen fusion proteins that recombinant Hepatitis B virions can be utilized in this role as well. Similarly, chimeric constructs coding for fusion proteins containing a portion of a protein encoded by a gene listed in Tables 1-5 and the poliovirus capsid protein can be created to enhance immunogenicity of the set of polypeptide antigens (see, for example, EP Publication No: 0259149; and Evans et al. (1989) Nature 339:385; Huang et al. (1988) J. Virol. 62:3855; and Schlienger et al. (1992) J. Virol. 66:2).

[0177] The Multiple antigen peptide system for peptide-based immunization can also be utilized to generate an immunogen, wherein a desired portion of a polypeptide encoded by a gene listed in Tables 1-5 is obtained directly from organo-chemical synthesis of the peptide onto an oligomeric branching lysine core (see, for example, Posnett et al. (1988) JBC 263:1719 and Nardelli et al. (1992) J. Immunol. 148:914). Antigenic determinants of proteins encoded by genes listed in Tables 1-5 can also be expressed and presented by bacterial cells.

[0178] Fusion proteins can also facilitate the expression of proteins including the polypeptides encoded by a gene listed in Tables 1-5. For example, polypeptides can be generated as glutathione-S-transferase (GST-fusion) proteins. Such GST-fusion proteins can be easily purified, as for example by the use of glutathione-derivatized matrices (see, for example, Current Protocols in Molecular Biology, eds. Ausubel et al. (N.Y.: John Wiley & Sons, 1991)) and used subsequently to yield purified polypeptides encoded by a gene listed in Tables 1-5.

[0179] The present invention further pertains to methods of producing the subject polypeptides. For example, a host cell transfected with a nucleic acid vector directing expression of a nucleotide sequence encoding the subject polypeptides can be cultured under appropriate conditions to allow expression of the peptide to occur. Suitable media for cell culture are well known in the art. The recombinant polypeptide can be isolated from cell culture medium, host cells, or both using techniques known in the art for purifying proteins including ion-exchange chromatography, gel filtration chromatography, ultrafiltration, electrophoresis, and immunoaffinity purification with antibodies specific for such peptide. In a preferred embodiment, the recombinant polypeptide is a fusion protein containing a domain which facilitates its purification, such as GST fusion protein.

[0180] Moreover, it will be generally appreciated that, under certain circumstances, it may be advantageous to provide homologs of one of the subject polypeptides which function in a limited capacity as one of either an agonist (mimetic) or an antagonist, in order to promote or inhibit only a subset of the biological activities of the naturally-occurring form of the protein. Thus, specific biological effects can be elicited by treatment with a homolog of limited function, and with fewer side effects relative to treatment with agonists or antagonists which are directed to all of the biological activities of naturally occurring forms of proteins encoded by genes listed in Tables 1-5.

[0181] Homologs of each of the subject proteins can be generated by mutagenesis, such as by discrete point mutation(s), and/or by truncation. For instance, mutation can give rise to homologs which retain substantially the same, or merely a subset, of the biological activity of the polypeptide from which it was derived. Alternatively, antagonistic forms of the protein can be generated which are able to inhibit the function of the naturally occurring form of the protein, such as by competitively binding to a receptor of a protein encoded by a gene listed in Tables 1-5.

[0182] The recombinant polypeptides of the present invention also include homologs of polypeptides encoded by the genes listed in Tables 1-5 which differ from the reference protein, such as versions of the protein which are resistant to proteolytic cleavage, as for example, due to mutations which alter ubiquitination or other enzymatic targeting associated with the protein.

[0183] Polypeptides encoded by the genes listed in Tables 1-5 may also be chemically modified to create derivatives by forming covalent or aggregate conjugates with other chemical moieties, such as glycosyl groups, lipids, phosphate, acetyl groups and the like. Covalent derivatives of proteins encoded by the genes listed in Tables 1-5 can be prepared by linking the chemical moieties to functional groups on amino acid side-chains of the protein or at the N-terminus or at the C-terminus of the polypeptide.

[0184] Modification of the structure of the subject polypeptides can be for such purposes as enhancing therapeutic or prophylactic efficacy, stability (e.g., ex vivo shelf life and resistance to proteolytic degradation), or post-translational modifications (e.g., to alter phosphorylation pattern of protein). Such modified peptides, when designed to retain at least one activity of the naturally-occurring form of the protein, or to produce specific antagonists thereof, are considered functional equivalents of the polypeptides described in more detail herein. Such modified peptides can be produced, for instance, by amino acid substitution, deletion, or addition. The substitutional variant may be a substituted conserved amino acid or a substituted non-conserved amino acid.

[0185] For example, it is reasonable to expect that an isolated replacement of a leucine with an isoleucine or valine, an aspartate with a glutamate, a threonine with a serine, or a similar replacement of an amino acid with a structurally related amino acid (i.e., isosteric and/or isoelectric mutations) will not have a major effect on the biological activity of the resulting molecule. Conservative replacements are those that take place within a family of amino acids that are related in their side chains. Genetically encoded amino acids can be divided into four families: (1) acidic=aspartate, glutamate; (2) basic=lysine, arginine, histidine; (3) nonpolar=alanine, valine, leucine, isoleucine, proline, phenylalanine, methionine, tryptophan; and (4) uncharged polar=glycine, asparagine, glutamine, cysteine, serine, threonine, tyrosine. In similar fashion, the amino acid repertoire can be grouped as (1) acidic=aspartate, glutamate; (2) basic=lysine, arginine histidine, (3) aliphatic=glycine, alanine, valine, leucine, isoleucine, serine, threonine, with serine and threonine optionally be grouped separately as aliphatic-hydroxyl; (4) aromatic=phenylalanine, tyrosine, tryptophan; (5) amide=asparagine, glutamine; and (6) sulfur-containing=cysteine and methionine. (see, for example, Biochemistry, 2^{nd} ed., Ed. by L. Stryer, WH Freeman and Co.: 1981). Whether a change in the amino acid sequence of a peptide results in a functional homolog (e.g., functional in the sense that the resulting polypeptide mimics or antagonizes the wild-type form) can be readily determined by assessing the ability of the variant peptide to produce a response in cells in a fashion similar to the wild-type protein, or competitively inhibit such a response. Polypeptides in which more than one replacement has taken place can readily be tested in the same manner.

[0186] Methods

[0187] The invention further provides predictive medicine methods, which are based, at least in part, on the discovery of polymorphic regions which are associated with specific physiological states and/or diseases or disorders, e.g., abnormal lipid levels, e.g., abnormally low HDL-C level, or a disease or disorder associated with abnormal lipid levels, e.g., a vascular or metabolic disease or disorder. These methods can be used alone, or in combination with other predictive medicine methods, including the identification and analysis of known risk factors associated with vascular diseases or disorders, metabolic diseases or disorders, and/or abnormal lipid levels, e.g., phenotypic factors such as, for example, family history.

[0188] For example, information obtained using the diagnostic assays described herein (in combination with each other or in combination with information of another genetic defect which contributes to the same disease, e.g., abnormal lipid levels, e.g., abnormally low HDL-C level, or a disease or disorder associated with abnormal lipid levels, e.g., a vascular or metabolic disease or disorder), is useful for diagnosing or confirming that a subject has an allele of a polymorphic region (e.g., a specific allele listed in Table 5) which is associated with a particular disease or disorder, e.g., abnormal lipid levels, e.g., abnormally low HDL-C level, or a disease or disorder associated with abnormal lipid levels, e.g., a vascular or metabolic disease or disorder, or a combination of alleles which are associated with a particular disease or disorder. Moreover, the information obtained using the diagnostic assays described herein, in combination with each other or in combination with information of another genetic defect which contributes to the same disease, e.g., abnormal lipid levels, e.g., abnormally low HDL-C level, or a disease or disorder associated with abnormal lipid levels, e.g., a vascular or metabolic disease or disorder, can be used to predict whether or not a subject will benefit from further diagnostic evaluation for abnormal lipid levels, e.g., abnormally low HDL-C level, or a disease or disorder associated with abnormal lipid levels, e.g., a vascular or metabolic disease or disorder. Such further diagnostic evaluation includes, but is not limited to, cardiovascular imaging, such as angiography, cardiac ultrasound, coronary angiogram, magnetic resonance imagery, nuclear imaging, CT scan, myocardial perfusion imagery, or electrocardiogram, genetic analysis, e.g., identification of additional polymorphisms e.g., which contribute to the same disease(s), familial health history analysis, lifestyle analysis, or exercise stress tests, either alone or in combination. Furthermore, the diagnostic information obtained using the diagnostic assays described herein (in combination with each other or in combination with information of another genetic defect which contributes to the same disease, e.g., a vascular or metabolic disease or disorder, or low HDL-C), may be used to identify which subject will benefit from a particular clinical course of therapy useful for preventing, treating, ameliorating, or prolonging onset of the particular disease or disorder, e.g., abnormal lipid levels, e.g., abnormally low HDL-C level, or a vascular or metabolic disease or disorder in the particular subject. Clinical courses of therapy include, but are not limited to, administration of medication, e.g., lipid modulating medication, non-surgical intervention, surgical procedures such as percutaneous transluminal coronary angioplasty, laser angioplasty, implantation of a stent, coronary bypass grafting, implantation of a defibrillator, implantation of a pacemaker, and any combination thereof, and use of surgical and non-surgical medical devices used in the treatment of vascular disease, such as, for example, a defibrillator, a stent, a device used in coronary revascularization, a pacemaker, and any combination thereof. Medical devices may also be used in combination with a modulator of gene expression of the genes identified in Tables 1-5 or polypeptide activity of polypeptides encoded by the genes identified in Tables 1-5.

[0189] Alternatively, the information, alone or in combination with information of another genetic defect which contributes to the same disorder, e.g., abnormal lipid levels, e.g., abnormally low HDL-C level, or a disease or disorder associated with abnormal lipid levels, e.g., a vascular or metabolic disease or disorder, can be used prognostically for predicting whether a non-symptomatic subject is likely to develop a disease or condition which is associated with one or more specific alleles of polymorphic regions of a gene listed in Tables 1-5 in a subject. Based on the prognostic information, a health care provider can recommend a particular further diagnostic evaluation which will benefit the subject, or a particular clinical course of therapy, as described above. The information may also be used to predict the response of a female subject to HRT.

[0190] In addition, knowledge of the identity of one or more particular alleles in a subject (the genetic profile of a gene listed in Tables 1-5), allows customization of further diagnostic evaluation and/or a clinical course of therapy for a particular disease. For example, a subject's genetic profile or the genetic profile of a disease or disorder associated with a specific allele of a polymorphic region of a gene listed in Tables 1-5, e.g., abnormal lipid levels, e.g., abnormally low HDL-C level, or a disease or disorder associated with abnormal lipid levels, e.g., a vascular or metabolic disease or disorder, can enable a health care provider: 1) to more efficiently and cost-effectively identify means for further diagnostic evaluation, including, but not limited to, further genetic analysis, familial health history analysis, or use of imaging devices or procedures; 2) to more effectively prescribe a drug that will address the molecular basis of the disease or condition; 3) to more efficiently and cost-effectively identify an appropriate clinical course of therapy, including, but not limited to, lifestyle changes, medications, surgical or non-surgical medical devices, surgical or non-surgical intervention or procedures, or any combination thereof; and 4) to better determine the appropriate dosage of a particular drug or duration of a particular course of clinical therapy. For example, the expression level of proteins encoded by genes listed in Tables 1-5, alone or in conjunction with the expression level of other genes known to contribute to the same disease, can be measured in many subjects at various stages of the disease to generate a transcriptional or expression profile of the disease. Expression patterns of individual subjects can then be compared to the expression profile of the disease to determine the appropriate drug, dose to administer to the subject, or course of clinical therapy.

[0191] The ability to target populations expected to show the highest clinical benefit, based on the genetic profile, can enable: 1) the repositioning of marketed drugs, medical devices and surgical procedures for use in treating, preventing, or ameliorating abnormal lipid levels or vascular or metabolic diseases or disorders, or diagnostics, such as imaging devices or procedures, with disappointing market results; 2) the rescue of drug candidates whose clinical development has been discontinued as a result of safety or efficacy limitations, which are subject subgroup-specific; 3) an accelerated and less costly development for drug candidates and more optimal drug labeling (e.g., since the use of genes listed in Tables 1-5 as markers is useful for optimizing effective dose); and 4) an accelerated, less costly, and more effective selection of a particular course of clinical therapy suited to a particular subject.

[0192] These and other methods are described in further detail in the following sections.

[0193] A. Prognostic and Diagnostic Assays

[0194] The present methods provide means for determining if a subject has or is or is not at risk of developing a disease, condition or disorder that is associated a specific allele of a gene listed in Tables 1-5, or combinations thereof, e.g., abnormal lipid levels, e.g., abnormally low HDL-C level, or a disease or disorder associated with abnormal lipid levels, e.g., a vascular or metabolic disease or disorder. The present methods also provide means for determining if a subject, e.g., a female subject, e.g., a postmenopausal female subject, is at risk for developing abnormal lipid levels and/or diseases or disorders associated with abnormal lipid levels, e.g., vascular or metabolic disorders, in response to treatment with HRT.

[0195] The present invention provides methods for determining the molecular structure of a gene listed in Tables 1-5, e.g., a human gene, or a portion thereof. In one embodiment, determining the molecular structure of at least a portion of a gene listed in Tables 1-5 comprises determining the identity of the allelic variant of at least one polymorphic region of a gene listed in Tables 1-5, or the complement thereof. A polymorphic region of a gene listed in Tables 1-5 can be located in an exon, an intron, at an intron/exon border, or in the 5′ upstream regulatory element of the subject gene.

[0196] The invention provides methods for determining whether a subject has or is at risk of developing, a disease or disorder associated with a specific allelic variant of a polymorphic region of a gene listed in Tables 1-5. Such diseases can be associated with aberrant polypeptide activity, e.g., abnormal lipid levels, e.g., abnormally low HDL-C level, or a disease or disorder associated with abnormal lipid levels, e.g., a vascular or metabolic disease or disorder.

[0197] Analysis of one or more polymorphic regions in a subject can be useful for predicting whether a subject has or is likely to develop abnormal lipid levels, e.g., abnormally low HDL-C level, or a disease or disorder associated with abnormal lipid levels, e.g., a vascular or metabolic disease or disorder.

[0198] In preferred embodiments, the methods of the invention can be characterized as comprising detecting, in a sample of cells from the subject, the presence or absence of a specific allelic variant of one or more polymorphic regions of a gene listed in Tables 1-5. The allelic differences can be: (i) a difference in the identity of at least one nucleotide or (ii) a difference in the number of nucleotides, which difference can be a single nucleotide or several nucleotides. The invention also provides methods for detecting differences in a gene listed in Tables 1-5 such as chromosomal rearrangements, e.g., chromosomal dislocation. The invention can also be used in prenatal diagnostics.

[0199] A preferred detection method is allele specific hybridization using probes overlapping the polymorphic site and having about 5, 10, 20, 25, or 30 nucleotides around the polymorphic region. In a preferred embodiment of the invention, several probes capable of hybridizing specifically to allelic variants are attached to a solid phase support, e.g., a “chip”. Oligonucleotides can be bound to a solid support by a variety of processes, including lithography. For example a chip can hold up to 250,000 oligonucleotides (GeneChip, Affymetrix). Mutation detection analysis using these chips comprising oligonucleotides, also termed “DNA probe arrays” is described e.g. in Cronin et al. (1996) Human Mutation 7:244. In one embodiment, a chip comprises all the allelic variants of at least one polymorphic region of a gene. The solid phase support is then contacted with a test nucleic acid and hybridization to the specific probes is detected. Accordingly, the identity of numerous allelic variants of one or more genes can be identified in a simple hybridization experiment. For example, the identity of the allelic variant of the nucleotide polymorphism in the 5′ upstream regulatory element can be determined in a single hybridization experiment.

[0200] In other detection methods, it is necessary to first amplify at least a portion of a gene prior to identifying the allelic variant. Amplification can be performed, e.g., by PCR and/or LCR (see Wu and Wallace, (1989) Genomics 4:560), according to methods known in the art. In one embodiment, genomic DNA of a cell is exposed to two PCR primers and amplification for a number of cycles sufficient to produce the required amount of amplified DNA. In preferred embodiments, the primers are located between 150 and 350 base pairs apart.

[0201] Alternative amplification methods include: self sustained sequence replication (Guatelli, J. C. et al., 1990, Proc. Natl. Acad. Sci. USA 87:1874-1878), transcriptional amplification system (Kwoh, D. Y. et al., 1989, Proc. Natl. Acad. Sci. USA 86:1173-1177), Q-Beta Replicase (Lizardi, P. M. et al., 1988, Bio/Technology 6:1197), and self-sustained sequence replication (Guatelli et al., (1989) Proc. Nat. Acad. Sci. 87:1874), and nucleic acid based sequence amplification (NABSA), or any other nucleic acid amplification method, followed by the detection of the amplified molecules using techniques well known to those of skill in the art. These detection schemes are especially useful for the detection of nucleic acid molecules if such molecules are present in very low numbers.

[0202] In one embodiment, any of a variety of sequencing reactions known in the art can be used to directly sequence at least a portion of a gene listed in Tables 1-5 and detect allelic variants, e.g., mutations, by comparing the sequence of the sample sequence with the corresponding reference (control) sequence. Exemplary sequencing reactions include those based on techniques developed by Maxam and Gilbert (Proc. Natl Acad Sci USA (1977) 74:560) or Sanger (Sanger et al. (1977) Proc. Nat. Acad. Sci 74:5463). It is also contemplated that any of a variety of automated sequencing procedures may be utilized when performing the subject assays (Biotechniques (1995) 19:448), including sequencing by mass spectrometry (see, for example, U.S. Pat. No. 5,547,835 and international patent application Publication Number WO 94/16101, entitled DNA Sequencing by Mass Spectrometry by H. Köster; U.S. Pat. No. 5,547,835 and international patent application Publication Number WO 94/21822 entitled “DNA Sequencing by Mass Spectrometry Via Exonuclease Degradation” by H. Köster), and U.S. Pat. No.5,605,798 and International Patent Application No. PCT[US96/03651 entitled DNA Diagnostics Based on Mass Spectrometry by H. Köster; Cohen et al. (1996) Adv Chromatogr 36:127-162; and Griffin et al. (1993) Appl Biochem Biotechnol 38:147-159). It will be evident to one skilled in the art that, for certain embodiments, the occurrence of only one, two or three of the nucleic acid bases need be determined in the sequencing reaction. For instance, A-track or the like, e.g., where only one nucleotide is detected, can be carried out.

[0203] Yet other sequencing methods are disclosed, e.g., in U.S. Pat. No. 5,580,732 and U.S. Pat. No. 5,571,676.

[0204] In some cases, the presence of a specific allele of a gene listed in Tables 1-5 in DNA from a subject can be shown by restriction enzyme analysis. For example, a specific nucleotide polymorphism can result in a nucleotide sequence comprising a restriction site which is absent from the nucleotide sequence of another allelic variant.

[0205] In a further embodiment, protection from cleavage agents (such as a nuclease, hydroxylamine or osmium tetroxide and with piperidine) can be used to detect mismatched bases in RNA/RNA DNA/DNA, or RNA/DNA heteroduplexes (Myers, et al. (1985) Science 230:1242). In general, the technique of “mismatch cleavage” starts by providing heteroduplexes formed by hybridizing a control nucleic acid, which is optionally labeled, e.g., RNA or DNA, comprising a nucleotide sequence of an allelic variant with a sample nucleic acid, e.g., RNA or DNA, obtained from a tissue sample. The double-stranded duplexes are treated with an agent which cleaves single-stranded regions of the duplex such as duplexes formed based on basepair mismatches between the control and sample strands. For instance, RNA/DNA duplexes can be treated with RNase and DNA/DNA hybrids treated with SI nuclease to enzymatically digest the mismatched regions. In other embodiments, either DNA/DNA or RNA/DNA duplexes can be treated with hydroxylamine or osmium tetroxide and with piperidine in order to digest mismatched regions. After digestion of the mismatched regions, the resulting material is then separated by size on denaturing polyacrylamide gels to determine whether the control and sample nucleic acids have an identical nucleotide sequence or in which nucleotides they are different. See, for example, Cotton et al. (1988) Proc. Natl Acad Sci USA 85:4397; Saleeba et al (1992) Methods Enzymol. 217:286-295. In a preferred embodiment, the control or sample nucleic acid is labeled for detection.

[0206] In another embodiment, an allelic variant can be identified by denaturing high-performance liquid chromatography (DHPLC) (Oefner and Underhill, (1995) Am. J. Human Gen. 57:Suppl. A266). DHPLC uses reverse-phase ion-pairing chromatography to detect the heteroduplexes that are generated during amplification of PCR fragments from individuals who are heterozygous at a particular nucleotide locus within that fragment (Oefner and Underhill (1995) Am. J. Human Gen. 57:Suppl. A266). In general, PCR products are produced using PCR primers flanking the DNA of interest. DHPLC analysis is carried out and the resulting chromatograms are analyzed to identify base pair alterations or deletions based on specific chromatographic profiles (see O'Donovan et al. (1998) Genomics 52:44-49).

[0207] In other embodiments, alterations in electrophoretic mobility is used to identify the type of allelic variant. For example, single strand conformation polymorphism (SSCP) may be used to detect differences in electrophoretic mobility between mutant and wild type nucleic acids (Orita et al. (1989) Proc Natl. Acad. Sci USA 86:2766; see also Cotton (1993) Mutat Res 285:125-144; and Hayashi (1992) Genet Anal Tech Appl 9:73-79). Single-stranded DNA fragments of sample and control nucleic acids are denatured and allowed to renature. The secondary structure of single-stranded nucleic acids varies according to sequence, the resulting alteration in electrophoretic mobility enables the detection of even a single base change. The DNA fragments may be labeled or detected with labeled probes. The sensitivity of the assay may be enhanced by using RNA (rather than DNA), in which the secondary structure is more sensitive to a change in sequence. In another preferred embodiment, the subject method utilizes heteroduplex analysis to separate double stranded heteroduplex molecules on the basis of changes in electrophoretic mobility (Keen et al. (1991) Trends Genet 7:5).

[0208] In yet another embodiment, the identity of an allelic variant of a polymorphic region is obtained by analyzing the movement of a nucleic acid comprising the polymorphic region in polyacrylamide gels containing a gradient of denaturant is assayed using denaturing gradient gel electrophoresis (DGGE) (Myers et al. (1985) Nature 313:495). When DGGE is used as the method of analysis, DNA will be modified to insure that it does not completely denature, for example by adding a GC clamp of approximately 40 bp of high-melting GC-rich DNA by PCR. In a further embodiment, a temperature gradient is used in place of a denaturing agent gradient to identify differences in the mobility of control and sample DNA (Rosenbaum and Reissner (1987) Biophys Chem 265:1275).

[0209] Examples of techniques for detecting differences of at least one nucleotide between 2 nucleic acids include, but are not limited to, selective oligonucleotide hybridization, selective amplification, or selective primer extension. For example, oligonucleotide probes may be prepared in which the known polymorphic nucleotide is placed centrally (allele-specific probes) and then hybridized to target DNA under conditions which permit hybridization only if a perfect match is found (Saiki et al. (1986) Nature 324:163); Saiki et al (1989) Proc. Natl Acad. Sci USA 86:6230; and Wallace et al. (1979) Nucl. Acids Res. 6:3543). Such allele specific oligonucleotide hybridization techniques may be used for the simultaneous detection of several nucleotide changes in different polylmorphic regions of a gene listed in Tables 1-5. For example, oligonucleotides having nucleotide sequences of specific allelic variants are attached to a hybridizing membrane and this membrane is then hybridized with labeled sample nucleic acid. Analysis of the hybridization signal will then reveal the identity of the nucleotides of the sample nucleic acid.

[0210] Alternatively, allele specific amplification technology which depends on selective PCR amplification may be used in conjunction with the instant invention. Oligonucleotides used as primers for specific amplification may carry the allelic variant of interest in the center of the molecule (so that amplification depends on differential hybridization) (Gibbs et al. (1989) Nucleic Acids Res. 17:2437-2448) or at the extreme 3′ end of one primer where, under appropriate conditions, mismatch can prevent, or reduce polymerase extension (Prossner (1993) Tibtech 11:238; Newton et al. (1989) Nucl. Acids Res. 17:2503). This technique is also termed “PROBE” for Probe Oligo Base Extension. In addition it may be desirable to introduce a novel restriction site in the region of the mutation to create cleavage-based detection (Gasparini et al. (1992) Mol. Cell Probes 6:1).

[0211] In another embodiment, identification of the allelic variant is carried out using an oligonucleotide ligation assay (OLA), as described, e.g., in U.S. Pat. No. 4,998,617 and in Landegren, U. et al., (1988) Science 241:1077-1080. The OLA protocol uses two oligonucleotides which are designed to be capable of hybridizing to abutting sequences of a single strand of a target. One of the oligonucleotides is linked to a separation marker, e.g., biotinylated, and the other is detectably labeled. If the precise complementary sequence is found in a target molecule, the oligonucleotides will hybridize such that their termini abut, and create a ligation substrate. Ligation then permits the labeled oligonucleotide to be recovered using avidin, or another biotin ligand. Nickerson, D. A. et al. have described a nucleic acid detection assay that combines attributes of PCR and OLA (Nickerson, D. A. et al., (1990) Proc. Natl. Acad. Sci. (U.S.A.) 87:8923-8927. In this method, PCR is used to achieve the exponential amplification of target DNA, which is then detected using OLA.

[0212] Several techniques based on this OLA method have been developed and can be used to detect specific allelic variants of a polymorphic region of a gene listed in Tables 1-5. For example, U.S. Pat. No. 5593826 discloses an OLA using an oligonucleotide having 3′-amino group and a 5′-phosphorylated oligonucleotide to form a conjugate having a phosphoramidate linkage. In another variation of OLA described in Tobe et al. ((1996) Nucleic Acids Res 24: 3728), OLA combined with PCR permits typing of two alleles in a single microtiter well. By marking each of the allele-specific primers with a unique hapten, i.e. digoxigenin and fluorescein, each OLA reaction can be detected by using hapten specific antibodies that are labeled with different enzyme reporters, alkaline phosphatase or horseradish peroxidase. This system permits the detection of the two alleles using a high throughput format that leads to the production of two different colors.

[0213] The invention further provides methods for detecting single nucleotide polymorphisms in a gene listed in Tables 1-5. Because single nucleotide polymorphisms constitute sites of variation flanked by regions of invariant sequence, their analysis requires no more than the determination of the identity of the single nucleotide present at the site of variation and it is unnecessary to determine a complete gene sequence for each subject. Several methods have been developed to facilitate the analysis of such single nucleotide polymorphisms.

[0214] In one embodiment, the single base polymorphism can be detected by using a specialized exonuclease-resistant nucleotide, as disclosed, e.g., in Mundy, C. R. (U.S. Pat. No. 4,656,127). According to the method, a primer complementary to the allelic sequence immediately 3′ to the polymorphic site is permitted to hybridize to a target molecule obtained from a particular animal or human. If the polymorphic site on the target molecule contains a nucleotide that is complementary to the particular exonuclease-resistant nucleotide derivative present, then that derivative will be incorporated onto the end of the hybridized primer. Such incorporation renders the primer resistant to exonuclease, and thereby permits its detection. Since the identity of the exonuclease-resistant derivative of the sample is known, a finding that the primer has become resistant to exonucleases reveals that the nucleotide present in the polymorphic site of the target molecule was complementary to that of the nucleotide derivative used in the reaction. This method has the advantage that it does not require the determination of large amounts of extraneous sequence data.

[0215] In another embodiment of the invention, a solution-based method is used for determining the identity of the nucleotide of a polymorphic site (Cohen, D. et al. (French Patent 2,650,840; PCT Application No. WO91/02087). As in the Mundy method of U.S. Pat. No. 4,656,127, a primer is employed that is complementary to allelic sequences immediately 3′ to a polymorphic site. The method determines the identity of the nucleotide of that site using labeled dideoxynucleotide derivatives, which, if complementary to the nucleotide of the polymorphic site will become incorporated onto the terminus of the primer.

[0216] An alternative method, known as Genetic Bit Analysis or GBA™ is described by Goelet, P. et al. (PCT Application No. 92/15712). The method of Goelet, P. et al. uses mixtures of labeled terminators and a primer that is complementary to the sequence 3′ to a polymorphic site. The labeled terminator that is incorporated is thus determined by, and complementary to, the nucleotide present in the polymorphic site of the target molecule being evaluated. In contrast to the method of Cohen et al. (French Patent 2,650,840; PCT Appln. No. WO91/02087) the method of Goelet, P. et al. is preferably a heterogeneous phase assay, in which the primer or the target molecule is immobilized to a solid phase.

[0217] Several primer-guided nucleotide incorporation procedures for assaying polymorphic sites in DNA have been described (Komher, J. S. et al., Nucl. Acids. Res. 17:7779-7784 (1989); Sokolov, B. P., Nucl. Acids Res. 18:3671 (1990); Syvanen, A. -C., et al., Genomics 8:684-692 (1990); Kuppuswamy, M. N. et al., Proc. Natl. Acad. Sci. (U.S.A.) 88:1143-1147 (1991); Prezant, T. R. et al., Hum. Mutat. 1:159-164 (1992); Ugozzoli, L. et al., GATA 9:107-112 (1992); Nyren, P. et al., Anal. Biochem. 208:171-175 (1993)). These methods differ from GBA™ in that they all rely on the incorporation of labeled deoxynucleotides to discriminate between bases at a polymorphic site. In such a format, since the signal is proportional to the number of deoxynucleotides incorporated, polymorphisms that occur in runs of the same nucleotide can result in signals that are proportional to the length of the run (Syvanen, A. -C., et al., Amer. J. Hum. Genet. 52:46-59 (1993)).

[0218] For determining the identity of the allelic variant of a polymorphic region located in the coding region of a gene listed in Tables 1-5, yet other methods than those described above can be used. For example, identification of an allelic variant which encodes a mutated protein can be performed by using an antibody specifically recognizing the mutant protein in, e.g., immunohistochemistry or immunoprecipitation. Antibodies to wild-type or mutated forms of proteins encoded by genes listed in Tables 1-5 can be prepared according to methods known in the art.

[0219] Alternatively, one can also measure an activity of a protein encoded by a gene listed in Tables 1-5, such as binding to a ligand of a protein encoded by a gene listed in Tables 1-5. Binding assays are known in the art and involve, e.g., obtaining cells from a subject, and performing binding experiments with a labeled ligand, to determine whether binding to the mutated form of the protein differs from binding to the wild-type of the protein.

[0220] Antibodies directed against reference or mutant polypeptides encoded by a gene listed in Tables 1-5 or allelic variant thereof, which are discussed above, may also be used in disease diagnostics and prognostics. Such diagnostic methods, may be used to detect abnormalities in the level of polypeptide expression, or abnormalities in the structure and/or tissue, cellular, or subcellular location of a polypeptide. Structural differences may include, for example, differences in the size, electronegativity, or antigenicity of the mutant polypeptide encoded by a gene listed in Tables 1-5 relative to the normal polypeptide encoded by a gene listed in Tables 1-5. Protein from the tissue or cell type to be analyzed may easily be detected or isolated using techniques which are well known to one of skill in the art, including but not limited to Western blot analysis. For a detailed explanation of methods for carrying out Western blot analysis, see Sambrook et al, 1989, supra, at Chapter 18. The protein detection and isolation methods employed herein may also be such as those described in Harlow and Lane, for example (Harlow, E. and Lane, D., 1988, “Antibodies: A Laboratory Manual”, Cold Spring Harbor Laboratory Press, Cold Spring Harbor, N.Y.), which is incorporated herein by reference in its entirety.

[0221] This can be accomplished, for example, by immunofluorescence techniques employing a fluorescently labeled antibody (see below) coupled with light microscopic, flow cytometric, or fluorimetric detection. The antibodies (or fragments thereof) useful in the present invention may, additionally, be employed histologically, as in immunofluorescence or immunoelectron microscopy, for in situ detection of a polypeptide encoded by a gene listed in Tables 1-5. In situ detection may be accomplished by removing a histological specimen from a subject, and applying thereto a labeled antibody of the present invention. The antibody (or fragment) is preferably applied by overlaying the labeled antibody (or fragment) onto a biological sample. Through the use of such a procedure, it is possible to determine not only the presence of the polypeptide, but also its distribution in the examined tissue. Using the present invention, one of ordinary skill will readily perceive that any of a wide variety of histological methods (such as staining procedures) can be modified in order to achieve such in situ detection.

[0222] Often a solid phase support or carrier is used as a support capable of binding an antigen or an antibody. Well-known supports or carriers include glass, polystyrene, polypropylene, polyethylene, dextran, nylon, amylases, natural and modified celluloses, polyacrylamides, gabbros, and magnetite. The nature of the carrier can be either soluble to some extent or insoluble for the purposes of the present invention. The support material may have virtually any possible structural configuration so long as the coupled molecule is capable of binding to an antigen or antibody. Thus, the support configuration may be spherical, as in a bead, or cylindrical, as in the inside surface of a test tube, or the external surface of a rod. Alternatively, the surface may be flat such as a sheet, test strip, etc. Preferred supports include polystyrene beads. Those skilled in the art will know many other suitable carriers for binding antibody or antigen, or will be able to ascertain the same by use of routine experimentation.

[0223] One means for labeling an antibody specific for a protein encoded by a gene listed in Tables 1-5 is via linkage to an enzyme and use in an enzyme immunoassay (EIA) (Voller, “The Enzyme Linked Immunosorbent Assay (ELISA)”, Diagnostic Horizons 2:1-7, 1978, Microbiological Associates Quarterly Publication, Walkersville, Md.; Voller, et al., J. Clin. Pathol. 31:507-520 (1978); Butler, Meth. Enzymol. 73:482-523 (1981); Maggio, (ed.) Enzyme Immunoassay, CRC Press, Boca Raton, Fla., 1980; Ishikawa, et al., (eds.) Enzyme Immunoassay, Kgaku Shoin, Tokyo, 1981). The enzyme which is bound to the antibody will react with an appropriate substrate, preferably a chromogenic substrate, in such a manner as to produce a chemical moiety which can be detected, for example, by spectrophotometric, fluorimetric or by visual means. Enzymes which can be used to detectably label the antibody include, but are not limited to, malate dehydrogenase, staphylococcal nuclease, delta-5-steroid isomerase, yeast alcohol dehydrogenase, alpha-glycerophosphate, dehydrogenase, triose phosphate isomerase, horseradish peroxidase, alkaline phosphatase, asparaginase, glucose oxidase, beta-galactosidase, ribonuclease, urease, catalase, glucose-6-phosphate dehydrogenase, glucoamylase and acetylcholinesterase. The detection can be accomplished by colorimetric methods which employ a chromogenic substrate for the enzyme. Detection may also be accomplished by visual comparison of the extent of enzymatic reaction of a substrate in comparison with similarly prepared standards.

[0224] Detection may also be accomplished using any of a variety of other immunoassays. For example, by radioactively labeling the antibodies or antibody fragments, it is possible to detect fingerprint gene wild type or mutant peptides through the use of a radioimmunoassay (RIA) (see, for example, Weintraub, B., Principles of Radioimmunoassays, Seventh Training Course on Radioligand Assay Techniques, The Endocrine Society, March, 1986, which is incorporated by reference herein). The radioactive isotope can be detected by such means as the use of a gamma counter or a scintillation counter or by autoradiography.

[0225] It is also possible to label the antibody with a fluorescent compound. When the fluorescently labeled antibody is exposed to light of the proper wave length, its presence can then be detected due to fluorescence. Among the most commonly used fluorescent labeling compounds are fluorescein isothiocyanate, rhodamine, phycoerythrin, phycocyanin, allophycocyanin, o-phthaldehyde and fluorescamine.

[0226] The antibody can also be detectably labeled using fluorescence emitting metals such as ¹⁵²Eu, or others of the lanthanide series. These metals can be attached to the antibody using such metal chelating groups as diethylenetriaminepentacetic acid (DTPA) or ethylenediaminetetraacetic acid (EDTA).

[0227] The antibody also can be detectably labeled by coupling it to a chemiluminescent compound. The presence of the chemiluminescent-tagged antibody is then determined by detecting the presence of luminescence that arises during the course of a chemical reaction. Examples of particularly useful chemiluminescent labeling compounds are luminol, isoluminol, theromatic acridinium ester, imidazole, acridinium salt and oxalate ester.

[0228] Likewise, a bioluminescent compound may be used to label the antibody of the present invention. Bioluminescence is a type of chemiluminescence found in biological systems in, which a catalytic protein increases the efficiency of the chemiluminescent reaction. The presence of a bioluminescent protein is determined by detecting the presence of luminescence. Important bioluminescent compounds for purposes of labeling are luciferin, luciferase and aequorin.

[0229] If a polymorphic region is located in an exon, either in a coding or non-coding portion of the gene, the identity of the allelic variant can be determined by determining the molecular structure of the mRNA, pre-mRNA, or cDNA. The molecular structure can be determined using any of the above described methods for determining the molecular structure of the genomic DNA.

[0230] The methods described herein may be performed, for example, by utilizing pre-packaged diagnostic kits, such as those described above, comprising at least one probe or primer nucleic acid described herein, which may be conveniently used, e.g., to determine whether a subject has or is at risk of developing a disease associated with a specific allelic variant.

[0231] Sample nucleic acid to be analyzed by any of the above-described diagnostic and prognostic methods can be obtained from any cell type or tissue of a subject. For example, a subject's bodily fluid (e.g. blood) can be obtained by known techniques (e.g. venipuncture). Alternatively, nucleic acid tests can be performed on dry samples (e.g. hair or skin). Fetal nucleic acid samples can be obtained from maternal blood as described in International Patent Application No. WO91/07660 to Bianchi. Alternatively, amniocytes or chorionic villi may be obtained for performing prenatal testing.

[0232] Diagnostic procedures may also be performed in situ directly upon tissue sections (fixed and/or frozen) of subject tissue obtained from biopsies or resections, such that no nucleic acid purification is necessary. Nucleic acid reagents may be used as probes and/or primers for such in situ procedures (see, for example, Nuovo, G. J., 1992, PCR in situ hybridization: protocols and applications, Raven Press, NY).

[0233] In addition to methods which focus primarily on the detection of one nucleic acid sequence, profiles may also be assessed in such detection schemes. Fingerprint profiles may be generated, for example, by utilizing a differential display procedure, Northern analysis and/or RT-PCR.

[0234] B. Pharmacogenomics

[0235] Knowledge of the identity of the allele of a polymorphic region of a gene in a subject (the genetic profile of a gene listed in Tables 1-5), alone or in conjunction with information of other genetic defects associated with the same disease (the genetic profile of the particular disease) also allows selection and customization of the therapy, e.g., a particular clinical course of therapy and/or further diagnostic evaluation for a particular disease to the subject's genetic profile. For example, subjects having specific alleles as listed in Table 5 may or may not exhibit symptoms of a particular disease or be predisposed to developing symptoms of a particular disease. Further, if those subjects are symptomatic, they may or may not respond to a certain drug, e.g., a specific therapeutic used in the treatment or prevention of abnormal lipid levels, vascular disease or disorder, e.g., CAD or MI, or a metabolic disease or disorder, such as, for example, beta blocker drugs, calcium channel blocker drugs, or nitrate drugs, cholesterol modulating, e.g., raising or lowering drugs, but may respond to another. Furthermore, they may or may not respond to other treatments, including, for example, use of medical devices for treatment of a vascular disease or disorder, a metabolic disease or disorders, or abnormal lipid levels, or surgical and/or non-surgical procedures or courses of treatment. Moreover, if a subject does or does not exhibit symptoms of a particular disease, the subject may or may not benefit from further diagnostic evaluation, including, for example, use of vascular imaging devices or procedures, for example. Furthermore, knowledge of the identity of the alleles of the polymorphic regions of a gene listed in Tables 1-5, in a subject, alone or in conjunction with information of other genetic defects associated with abnormal lipid levels or diseases or disorders associated therewith, allows predictions to be made with respect to the response by a subject to a certain therapy, e.g., HRT. For example, if a subject has alleles associated with abnormally low HDL-C, the subject's response to treatment with HRT may be a decrease in HDL-C level.

[0236] Thus, generation of a genetic profile of a gene listed in Tables 1-5, (e.g., categorization of alterations in a gene listed in Tables 1-5 which are associated with the development of a particular disease, e.g., those alleles listed in Table 5), from a population of subjects, who are symptomatic for a disease or condition that is caused by or contributed to by a defective and/or deficient gene and/or protein (a genetic population profile) and comparison of a subject's genetic profile to the population profile, permits the selection or design of drugs that are expected to be safe and efficacious for a particular subject or subject population (i.e., a group of subjects having the same genetic alteration), as well as the selection or design of a particular clinical course of therapy or further diagnostic evaluations that are expected to be safe and efficacious for a particular subject or subject population.

[0237] For example, a population profile can be performed by determining the specific gene profile, e.g., the identity of specific alleles listed in Table 5, in a subject population having a disease, which is associated with one or more specific alleles of the polymorphic regions of the gene. Optionally, the population profile can further include information relating to the response of the population to a therapeutic specific to the gene, using any of a variety of methods, including, monitoring: 1) the severity of symptoms associated with the abnormal lipid levels or vascular or metabolic diseases or disorders; 2) gene expression level; 3) mRNA level; and/or 4) protein level, and dividing or categorizing the population based on particular alleles. The genetic population profile can also, optionally, indicate those particular alleles which are present in subjects that are either responsive or non-responsive to a particular therapeutic, clinical course of therapy, or diagnostic evaluation. This information or population profile, is then useful for predicting which individuals should respond to particular drugs, particular clinical courses of therapy, or diagnostic evaluations based on their individual genetic profile of the specific gene.

[0238] In a preferred embodiment, the genetic profile is a transcriptional or expression level profile and is comprised of determining the expression level of proteins encoded by the specific gene, alone or in conjunction with the expression level of other genes known to contribute to the same disease at various stages of the disease.

[0239] Pharmacogenomic studies can also be performed using transgenic animals. For example, one can produce transgenic mice, e.g., as described herein, which contain a specific allelic variant of a gene listed in Tables 1-5. These mice can be created, e.g., by replacing their wild-type gene with an allele of the human gene listed in Tables 1-5. The response of these mice to specific particular therapeutics, clinical courses of treatment, and/or diagnostic evaluations can then be determined.

[0240] (i) Diagnostic Evaluation

[0241] In one embodiment, the polymorphisms of the present invention are used to determine the most appropriate diagnostic evaluation and to determine whether or not a subject will benefit from further diagnostic evaluation. Thus, in one embodiment, the invention provides methods for classifying a subject who has, or is at risk for developing abnormal lipid levels, e.g., abnormally low HDL-C level, or a disease or disorder associated with abnormal lipid levels, e.g., a vascular or metabolic disease or disorder, as a candidate for further diagnostic evaluation for a disease or disorder comprising the steps of determining the genetic profile of the subject, comparing the subject's genetic profile to the genetic profile of a gene listed in Tables 1-5, and classifying the subject based on the identified genetic profiles as a subject who is a candidate for further diagnostic evaluation for abnormal lipid levels, e.g., abnormally low HDL-C level, or a disease or disorder associated with abnormal lipid levels, e.g., a vascular or metabolic disease or disorder. The invention also provides methods for classifying a subject as a candidate for treatment with HRT.

[0242] In a preferred embodiment, the subject's genetic profile is determined by identifying the nucleotides present at the nucleotide positions of the SNPs set forth in Tables 1-5, wherein the presence of the specific alleles listed in Table 5, for example, indicates that a subject has, or is at increased risk for abnormal lipid levels, e.g. low HDL-C levels.

[0243] Methods of further diagnostic evaluation include use of vascular imaging devices or procedures such as, for example, angiography, cardiac ultrasound, coronary angiogram, magnetic resonance imagery, nuclear imaging, CT scan, myocardial perfusion imagery, or electrocardiogram, or may include genetic analysis, familial health history analysis, lifestyle analysis, exercise stress tests, or any combination thereof.

[0244] In another embodiment, the invention provides methods for selecting an effective imaging device as a diagnostic tool for abnormal lipid levels, e.g., abnormally low HDL-C level, or a disease or disorder associated with abnormal lipid levels, e.g., a vascular or metabolic disease or disorder, comprising the steps of determining the genetic profile of the subject; comparing the subject's genetic profile to a genetic profile of a gene listed in Tables 1-5; and selecting an effective imaging device or procedure as a diagnostic tool for abnormal lipid levels, or a vascular or metabolic disease or disorder. In a preferred embodiment, the imaging device is selected from the group consisting of angiography, cardiac ultrasound, coronary angiogram, magnetic resonance imagery, nuclear imaging, CT scan, myocardial perfusion imagery, electrocardiogram, plaque imaging, or any combination thereof.

[0245] (ii) Clinical Course of Therapy

[0246] In another aspect, the polymorphisms of the present invention are used to determine the most appropriate clinical course of therapy for a subject who has or is at risk of abnormal lipid levels, e.g., abnormally low HDL-C level, or a disease or disorder associated with abnormal lipid levels, e.g., a vascular or metabolic disease or disorder, and will aid in the determination of whether the subject will benefit from such clinical course of therapy, as determined by identification of the polymorphisms of the invention. If a subject has at any of the alleles listed in Table 5, or the complements thereof, that subject is more likely to have or to be at a higher than normal risk of developing abnormal lipid levels, e.g., low HDL-C levels, or a disease or disorder associated with abnormal lipid levels, e.g., a vascular disease or disorder or a metabolic disease or disorder.

[0247] Thus, in one aspect, the invention relates to the SNPs identified as described herein, in combination, as well as to the use of these SNPs, and others in these genes, particularly those nearby in linkage disequilibrium with these SNPs, in combination, for prediction of a particular clinical course of therapy for a subject who has, or is at risk for developing, abnormal lipid levels, e.g., abnormally low HDL-C level, or a disease or disorder associated with abnormal lipid levels, e.g., a vascular or metabolic disease or disorder. In one embodiment, the invention provides a method for determining whether a subject will benefit from a particular course of therapy by determining the presence of the polymorphisms of the invention. For example, the determination of the polymorphisms of the invention, in combination with each other, or in combination with other polymorphisms in a gene listed in Tables 1-5, or other genes, will aid in the determination of whether an individual will benefit from, for example, surgical revascularization and/or will benefit by the implantation of a stent following surgical revascularization, and will aid in the determination of the likelihood of success or failure of a particular clinical course of therapy.

[0248] In one embodiment, the invention provides methods for classifying a subject who has, or is at risk for developing, abnormal lipid levels, e.g., abnormally low HDL-C level, or a disease or disorder associated with abnormal lipid levels, e.g., a vascular or metabolic disease or disorder as a candidate for a particular clinical course of therapy for a vascular disease or disorder comprising the steps of determining the genetic profile of the subject; comparing the subject's genetic profile to a gene listed in Tables 1-5 genetic population profile; and classifying the subject based on the identified genetic profiles as a subject who is a candidate for a particular clinical course of therapy for a abnormal lipid levels or a vascular disease or disorder.

[0249] In another embodiment, the invention provides methods for selecting an effective clinical course of therapy to treat a subject who has, or is at risk for developing, abnormal lipid levels, e.g., abnormally low HDL-C level, or a disease or disorder associated with abnormal lipid levels, e.g., a vascular or metabolic disease or disorder comprising the steps of: determining the genetic profile of the subject; comparing the subject's genetic profile to the genetic profile of a gene listed in Tables 1-5; and selecting an appropriate clinical course of therapy for treatment of a subject who has, or is at risk for developing, abnormal lipid levels, e.g., abnormally low HDL-C level, or a disease or disorder associated with abnormal lipid levels, e.g., a vascular or metabolic disease or disorder.

[0250] An appropriate clinical course of therapy may include, for example, a lifestyle change, including, for example, a change in diet, exercise, or enviromnent. Other clinical courses of therapy include, but are not limited to, use of surgical procedures or medical devices. Surgical procedures for the treatment of vascular disorders, includes, for example, surgical revascularization, such as angioplasty, e.g., percutaneous transluminal coronary balloon angioplasty (PTCA), or laser angioplasty, or coronary bypass grafting (CABG). Medical devices used in the treatment or prevention of vascular diseases or disorders, include, for example, devices used in angioplasty, such as balloon angioplasty or laser angioplasty, a device used in coronary revascularization, or a stent, a defibrillator, a pacemaker, or any combination thereof. Medical devices may also be used in combination with modulators of gene expression or protein activity.

[0251] C. Monitoring Effects of Therapeutics During Clinical Trials

[0252] The present invention provides a method for monitoring the effectiveness of treatment of a subject with a therapeutic e.g., a modulator or agent of a gene listed in Tables 1-5 or a polypeptide encoded by a gene listed in Tables 1-5 (e.g., an agonist, antagonist, such as, for example, a peptidomimetic, protein, peptide, nucleic acid, ribozyme, small molecule, or other drug candidate identified, e.g., by the screening assays described herein) comprising the steps of (i) obtaining a preadministration sample from a subject prior to administration of the agent; (ii) detecting the level of expression or activity of a protein encoded by a gene listed in Tables 1-5, mRNA or gene listed in Tables 1-5 in the preadministration sample; (iii) obtaining one or more post-administration samples from the subject; (iv) detecting the level of expression or activity of the protein encoded by a gene listed in Tables 1-5, mRNA or gene listed in Tables 1-5 in the post-administration samples; (v) comparing the level of expression or activity of the protein encoded by a gene listed in Tables 1-5, mRNA, or gene listed in Tables 1-5 in the preadministration sample with those of the protein encoded by a gene listed in Tables 1-5, mRNA, or gene listed in Tables 1-5 in the post administration sample or samples; and (vi) altering the administration of the agent to the subject accordingly. For example, increased administration of the agent may be desirable to increase the expression or activity of the gene listed in Tables 1-5 to higher levels than detected, i.e., to increase the effectiveness of the agent. Alternatively, decreased administration of the agent may be desirable to decrease expression or activity of the gene to lower levels than detected, i.e., to decrease the effectiveness of the agent.

[0253] Cells of a subject may also be obtained before and after administration of a therapeutic to detect the level of expression of genes other than a gene listed in Tables 1-5, to verify that the therapeutic does not increase or decrease the expression of genes which could be deleterious. This can be done, e.g., by using the method of transcriptional profiling. Thus, mRNA from cells exposed in vivo to a therapeutic and mRNA from the same type of cells that were not exposed to the therapeutic could be reverse transcribed and hybridized to a chip containing DNA from numerous genes, to thereby compare the expression of genes in cells treated and not treated with a therapeutic. If, for example a therapeutic turns on the expression of a proto-oncogene in a subject, use of this particular therapeutic may be undesirable.

[0254] D. Methods of Treatment

[0255] The present invention provides for both prophylactic and therapeutic methods of treating a subject having or likely to develop a disorder associated with specific alleles and/or aberrant expression or activity, e.g., abnormal lipid levels, e.g., abnormally low HDL-C level, or a disease or disorder associated with abnormal lipid levels, e.g., a vascular or metabolic disease or disorder.

[0256] i) Prophylactic Methods

[0257] In one aspect, the invention provides a method for preventing a disease or disorder associated with a specific allele such as abnormal lipid levels, e.g., abnormally low HDL-C level, or a disease or disorder associated with abnormal lipid levels, e.g., a vascular or metabolic disease or disorder, and medical conditions resulting therefrom, by administering to the subject an agent which counteracts the unfavorable biological effect of the specific allele. Subjects at risk for such a disease can be identified by a diagnostic or prognostic assay, e.g., as described herein. Administration of a prophylactic agent can occur prior to the manifestation of symptoms associated with specific alleles, such that a disease or disorder is prevented or, alternatively, delayed in its progression. Depending on the identity of the allele in a subject, a compound that counteracts the effect of this allele is administered. The compound can be a compound modulating the activity of a polypeptide encoded by a gene listed in Tables 1-5, e.g., an inhibitor of a polypeptide encoded by a gene listed in Tables 1-5. The treatment can also be a specific lifestyle change, e.g., a change in diet, exercise, or an environmental alteration. In particular, the treatment can be undertaken prophylactically, before any other symptoms are present. Such a prophylactic treatment could thus prevent the development of abnormal lipid levels, e.g., abnormally low HDL-C level, or a disease or disorder associated with abnormal lipid levels, e.g., a vascular or metabolic disease or disorder. The prophylactic methods are similar to therapeutic methods of the present invention and are further discussed in the following subsections.

[0258] (ii) Therapeutic Methods

[0259] The invention further provides methods of treating a subject having a disease or disorder associated with a specific allelic variant of a polymorphic region of a gene listed in Tables 1-5, including abnormal lipid levels, e.g., abnormally low HDL-C level, or a disease or disorder associated with abnormal lipid levels, e.g., a vascular or metabolic disease or disorder.

[0260] In one embodiment, the method comprises (a) determining the identity of one or more of the allelic variants of a gene listed in Tables 1-5, or preferably, the identity of the nucleotides at the specific variant nucleotide positions, or the complements thereof, and (b) administering to the subject a compound that compensates for the effect of the specific allelic variant(s). The polymorphic region can be localized at any location of the gene, e.g., in a regulatory element (e.g., in a 5′ upstream regulatory element), in an exon, (e.g., coding region of an exon), in an intron, at an exon/intron border, or in the 3′ UTR. Thus, depending on the site of the polymorphism in a gene listed in Tables 1-5, a subject having a specific variant of the polymorphic region which is associated with a specific disease or condition, can be treated with compounds which specifically compensate for the effect of the allelic variant.

[0261] In a preferred embodiment, the identity of the nucleotides present at any of the polymorphic sites listed in Tables 1-5, or the complement thereof, is determined. For example, if a subject has any of the alleles listed in Table 5, or the complements thereof, that subject is more likely to have or to be at a higher than normal risk of developing abnormal lipid levels, e.g., low HDL-C levels, or a disease or disorder associated with abnormal lipid levels, e.g., a vascular disease or disorder or a metabolic disease or disorder.

[0262] A mutation can be a substitution, deletion, and/or addition of at least one nucleotide relative to the wild-type allele (i.e., the reference sequence). Depending on where the mutation is located in the gene, the subject can be treated to specifically compensate for the mutation. For example, if the mutation is present in the coding region of the gene and results in a more active protein, the subject can be treated, e.g., by administration to the subject of a modulator, e.g., a therapeutic or course of clinical treatment which treat, prevents, or abnormal lipid levels, e.g., abnormally low HDL-C level, or a disease or disorder associated with abnormal lipid levels, e.g., a vascular or metabolic disease or disorder. Normal protein can also be used to counteract or compensate for the endogenous mutated form of the protein encoded by a gene listed in Tables 1-5. Normal protein can be directly delivered to the subject or indirectly by gene therapy wherein some cells in the subject are transformed or transfected with an expression construct encoding wild-type protein. Nucleic acids encoding reference human proteins of the invention are set forth in SEQ ID NOs: 27-45.

[0263] Yet in another embodiment, the invention provides methods for treating a subject having a mutated gene listed in Tables 1-5, in which the mutation is located in a regulatory region of the gene. Such a regulatory region can be localized in the 5′ upstream regulatory element of the gene, in the 5′ or 3′ untranslated region of an exon, or in an intron. A mutation in a regulatory region can result in increased production of protein encoded by a gene listed in Tables 1-5, decreased production of the protein encoded by a gene listed in Tables 1-5, or production of protein encoded by a gene listed in Tables 1-5 having an aberrant tissue distribution. The effect of a mutation in a regulatory region upon the protein can be determined, e.g., by measuring the protein level or mRNA level in cells having a gene listed in Tables 1-5 having this mutation and which, normally (i.e., in the absence of the mutation) produce the protein. The effect of a mutation can also be determined in vitro. For example, if the mutation is in the 5′ upstream regulatory element, a reporter construct can be constructed which comprises the mutated 5′ upstream regulatory element linked to a reporter gene, the construct transfected into cells, and comparison of the level of expression of the reporter gene under the control of the mutated 5′ upstream regulatory element and under the control of a wild-type 5′ upstream regulatory element. Such experiments can also be carried out in mice transgenic for the mutated 5′ upstream regulatory element. If the mutation is located in an intron, the effect of the mutation can be determined, e.g., by producing transgenic animals in which the mutated gene has been introduced and in which the wild-type gene may have been knocked out. Comparison of the level of expression of a gene listed in Tables 1-5 in the mice transgenic for the mutant human gene listed in Tables 1-5 with mice transgenic for a wild-type human gene listed in Tables 1-5 will reveal whether the mutation results in increased, or decreased synthesis of the protein and/or aberrant tissue distribution of the protein. Such analysis could also be performed in cultured cells, in which the human mutant gene is introduced and, e.g., replaces the endogenous wild-type gene in the cell. Thus, depending on the effect of the mutation in a regulatory region of a gene listed in Tables 1-5, a specific treatment can be administered to a subject having such a mutation. Accordingly, if the mutation results in increased protein levels, the subject can be treated by administration of a compound which reduces protein production, e.g., by reducing gene expression or a compound which inhibits or reduces the activity of the protein encoded by a gene listed in Tables 1-5.

[0264] A correlation between drug responses and specific alleles of a gene listed in Tables 1-5 can be shown, for example, by clinical studies wherein the response to specific drugs of subjects having different allelic variants of a polymorphic region of a gene listed in Tables 1-5 is compared. Such studies can also be performed using animal models, such as mice having various alleles of a human gene listed in Tables 1-5 and in which, e.g., the endogenous gene has been inactivated such as by a knock-out mutation. Test drugs are then administered to the mice having different human alleles and the response of the different mice to a specific compound is compared. Accordingly, the invention provides assays for identifying the drug which will be best suited for treating a specific disease or condition in a subject. For example, it will be possible to select drugs which will be devoid of toxicity, or have the lowest level of toxicity possible for treating a subject having a disease or condition.

[0265] Other Uses For the Nucleic Acid Molecules of the Invention

[0266] The identification of different alleles of a gene listed in Tables 1-5 can also be useful for identifying an individual among other individuals from the same species. For example, DNA sequences can be used as a fingerprint for detection of different individuals within the same species (Thompson, J. S. and Thompson, eds., Genetics in Medicine, WB Saunders Co., Philadelphia, Pa. (1991)). This is useful, for example, in forensic studies and paternity testing, as described below.

[0267] A. Forensics

[0268] Determination of which specific allele occupies a set of one or more polymorphic sites in an individual identifies a set of polymorphic forms that distinguish the individual from others in the population. See generally National Research Council, The Evaluation of Forensic DNA Evidence (Eds. Pollard et al., National Academy Press, DC, 1996). The more polymorphic sites that are analyzed, the lower the probability that the set of polymorphic forms in one individual is the same as that in an unrelated individual. Preferably, if multiple sites are analyzed, the sites are unlinked. Thus, the polymorphisms of the invention can be used in conjunction with known polymorphisms in distal genes. Preferred polymorphisms for use in forensics are biallelic because the population frequencies of two polymorphic forms can usually be determined with greater accuracy than those of multiple polymorphic forms at multi-allelic loci.

[0269] The capacity to identify a distinguishing or unique set of polymorphic markers in an individual is useful for forensic analysis. For example, one can determine whether a blood sample from a suspect matches a blood or other tissue sample from a crime scene by determining whether the set of polymorphic forms occupying selected polymorphic sites is the same in the suspect and the sample. If the set of polymorphic markers does not match between a suspect and a sample, it can be concluded (barring experimental error) that the suspect was not the source of the sample. If the set of markers is the same in the sample as in the suspect, one can conclude that the DNA from the suspect is consistent with that found at the crime scene. If frequencies of the polymorphic forms at the loci tested have been determined (e.g., by analysis of a suitable population of individuals), one can perform a statistical analysis to determine the probability that a match of suspect and crime scene sample would occur by chance.

[0270] p(ID) is the probability that two random individuals have the same polymorphic or allelic form at a given polymorphic site. For example, in biallelic loci, four genotypes are possible: AA, AB, BA, and BB. If alleles A and B occur in a haploid genome of the organism with frequencies x and y, the probability of each genotype in a diploid organism is (see WO 95/12607):

Homozygote:p(AA)=x²

Homozygote:p(BB)=y²=(1−x)²

Single Heterozygote:p(AB)=p(BA)=xy=x(1−x)

Both Heterozygotes:p(AB+BA)=2xy=2x(1−x)

[0271] The probability of identity at one locus (i.e., the probability that two individuals, picked at random from a population will have identical polymorphic forms at a given locus) is given by the equation:

p(ID)=(x²).

[0272] These calculations can be extended for any number of polymorphic forms at a given locus. For example, the probability of identity p(ID) for a 3-allele system where the alleles have the frequencies in the population of x, y, and z, respectively, is equal to the sum of the squares of the genotype frequencies:

P(ID)=x⁴+(2xy)²+(2yz)²+(2xz)²+z⁴+y⁴.

[0273] In a locus of n alleles, the appropriate binomial expansion is used to calculate p(ID) and p(exc).

[0274] The cumulative probability of identity (cum p(ID)) for each of multiple unlinked loci is determined by multiplying the probabilities provided by each locus:

cum p(ID)=p(ID1)p(ID2)p(ID3) . . . p(IDn).

[0275] The cumulative probability of non-identity for n loci (i.e., the probability that two random individuals will be difference at 1 or more loci) is given by the equation:

cum p(nonID)=1−cum p(ID).

[0276] If several polymorphic loci are tested, the cumulative probability of non-identity for random individuals becomes very high (e.g., one billion to one). Such probabilities can be taken into account together with other evidence in determining the guilt or innocence of the suspect.

[0277] B. Paternity Testing

[0278] The object of paternity testing is usually to determine whether a male is the father of a child. In most cases, the mother of the child is known, and thus, it is possible to trace the mother's contribution to the child's genotype. Paternity testing investigates whether the part of the child's genotype not attributable to the mother is consistent to that of the putative father. Paternity testing can be performed by analyzing sets of polymorphisms in the putative father and in the child.

[0279] If the set of polymorphisms in the child attributable to the father does not match the set of polymorphisms of the putative father, it can be concluded, barring experimental error, that that putative father is not the real father. If the set of polymorphisms in the child attributable to the father does match the set of polymorphisms of the putative father, a statistical calculation can be performed to determine the probability of a coincidental match.

[0280] The probability of parentage exclusion (representing the probability that a random male will have a polymorphic form at a given polymorphic site that makes him incompatible as the father) is given by the equation (see WO 95/12607): p(exc)=xy(1−xy), where x and y are the population frequencies of alleles A and B of a biallelic polymorphic site.

[0281] (At a triallelic site p(exc)=xy(1−xy)+yz(1−yz)+xz(1−xz)+3xyz(1−xyz)), where x, y, and z and the respective populations frequencies of alleles A, B, and C).

[0282] The probability of non-exclusion is: p(non-exc)=1−p(exc).

[0283] The cumulative probability of non-exclusion (representing the values obtained when n loci are is used) is thus:

Cum p(non-exc)=p(non-exc1)p(non-exc2)p(non-exc3) . . . p(non-excn).

[0284] The cumulative probability of the exclusion for n loci (representing the probability that a random male will be excluded: cum p(exc)=1−cum p(non-exc).

[0285] If several polymorphic loci are included in the analysis, the cumulative probability of exclusion of a random male is very high. This probability can be taken into account in assessing the liability of a putative father whose polymorphic marker set matches the child's polymorphic marker set attributable to his or her father.

[0286] C. Kits

[0287] As set forth herein, the invention provides methods, e.g. diagnostic and therapeutic methods, e.g., for determining the type of allelic variant of a polymorphic region present in a gene listed in Tables 1-5, such as a human gene listed in Tables 1-5. In preferred embodiments, the methods use probes or primers comprising nucleotide sequences which are complementary to a polymorphic region of a gene listed in Tables 1-5 (SEQ ID NOs: 1-26). In a preferred embodiment, the methods use probes or primers comprising nucleotide sequences which are complementary to a polymorphic region of a gene listed in Tables 1-5. Accordingly, the invention provides kits for performing these methods. In a preferred embodiment, the kit comprises probes or primers comprising nucleotide sequences which are complementary to one or more of the alleles at of the SNPs listed in Table 5, or the complements thereof. For example, if a subject has any of the alleles listed in Table 5, or the complements thereof, that subject is more likely to have or to be at a higher than normal risk of developing abnormal lipid levels, e.g., abnormally low HDL-C level, or a disease or disorder associated with abnormal lipid levels, e.g., a vascular or metabolic disease or disorder.

[0288] In a preferred embodiment, the invention provides a kit for determining whether a subject has or is at risk of developing a disease or condition associated with a specific allelic variant of a polymorphic region of a gene listed in Tables 1-5. In an even more preferred embodiment, the disease or disorder is characterized by an abnormal activity of a polypeptide encoded by a gene listed in Tables 1-5. In an even more preferred embodiment, the invention provides a kit for determining whether a subject has or is or is not at risk of developing abnormal lipid levels, e.g., abnormally low HDL-C level, or a disease or disorder associated with abnormal lipid levels, e.g., a vascular or metabolic disease or disorder.

[0289] A preferred kit provides reagents for determining whether a subject is likely to develop abnormal lipid levels, e.g., abnormally low HDL-C level, or a disease or disorder associated with abnormal lipid levels, e.g., a vascular or metabolic disease or disorder.

[0290] Preferred kits comprise at least one probe or primer which is capable of specifically hybridizing under stringent conditions to a sequence or polymorphic region of a gene listed in Tables 1-5 and instructions for use. The kits preferably comprise at least one of the above described nucleic acids. Preferred kits for amplifying at least a portion of a gene listed in Tables 1-5 comprise at least two primers, at least one of which is capable of hybridizing to an allelic variant sequence.

[0291] The kits of the invention can also comprise one or more control nucleic acids or reference nucleic acids, such as nucleic acids comprising an intronic sequence. For example, a kit can comprise primers for amplifying a polymorphic region of a gene listed in Tables 1-5 and a control DNA corresponding to such an amplified DNA and having the nucleotide sequence of a specific allelic variant. Thus, direct comparison can be performed between the DNA amplified from a subject and the DNA having the nucleotide sequence of a specific allelic variant. In one embodiment, the control nucleic acid comprises at least a portion of a gene listed in Tables 1-5 of an individual who does not have abnormal lipid levels, e.g., abnormally low HDL-C level, or a disease or disorder associated with abnormal lipid levels, e.g., a vascular or metabolic disease or disorder, or a disease or disorder associated with an aberrant activity of a polypeptide encoded by a gene listed in Tables 1-5.

[0292] Yet other kits of the invention comprise at least one reagent necessary to perform the assay. For example, the kit can comprise an enzyme. Alternatively the kit can comprise a buffer or any other necessary reagent.

[0293] D. Electronic Apparatus Readable Media and Arrays

[0294] Electronic apparatus readable media comprising polymorphisms of the present invention is also provided. As used herein, “electronic apparatus readable media” and “computer readable media,” which are used interchangeably herein, refer to any suitable medium for storing, holding or containing data or information that can be read and accessed directly by an electronic apparatus. Such media can include, but are not limited to: magnetic storage media, such as floppy discs, hard disc storage medium, and magnetic tape; optical storage media such as compact disc; electronic storage media such as RAM, ROM, EPROM, EEPROM and the like; general hard disks and hybrids of these categories such as magnetic/optical storage media. The medium is adapted or configured for having recorded thereon a marker of the present invention.

[0295] As used herein, the term “electronic apparatus” is intended to include any suitable computing or processing apparatus or other device configured or adapted for storing data or information. Examples of electronic apparatus suitable for use with the present invention include stand-alone computing apparatus; networks, including a local area network (LAN), a wide area network (WAN) Internet, Intranet, and Extranet; electronic appliances such as a personal digital assistants (PDAs), cellular phone, pager and the like; and local and distributed processing systems.

[0296] As used herein, “recorded” refers to a process for storing or encoding information on the electronic apparatus readable medium. Those skilled in the art can readily adopt any of the presently known methods for recording information on known media to generate manufactures comprising the polymorphisms of the present invention.

[0297] A variety of software programs and formats can be used to store the polymorphisms information of the present invention on the electronic apparatus readable medium. For example, the polymorphic sequence can be represented in a word processing text file, formatted in commercially-available software such as WordPerfect and MicroSoft Word, or represented in the form of an ASCII file, stored in a database application, such as DB2, Sybase, Oracle, or the like, as well as in other forms. Any number of data processor structuring formats (e.g., text file or database) may be employed in order to obtain or create a medium having recorded thereon the markers of the present invention.

[0298] By providing the polymorphisms of the invention in readable form, in combination, one can routinely access the polymorphism information for a variety of purposes. For example, one skilled in the art can use the sequences of the polymorphisms of the present invention in readable form to compare a target sequence or target structural motif with the sequence information stored within the data storage means. Search means are used to identify fragments or regions of the sequences of the invention which match a particular target sequence or target motif.

[0299] The present invention therefore provides a medium for holding instructions for performing a method for determining whether a subject has abnormal lipid levels, e.g., abnormally low HDL-C level, or a disease or disorder associated with abnormal lipid levels, e.g., a vascular or metabolic disease or disorder or a pre-disposition to abnormal lipid levels, e.g., abnormally low HDL-C level, or a disease or disorder associated with abnormal lipid levels, e.g., a vascular or metabolic disease or disorder, wherein the method comprises the steps of determining the presence or absence of a polymorphism and based on the presence or absence of the polymorphism, determining whether the subject has abnormal lipid levels or a pre-disposition to abnormal lipid levels and/or recommending a particular clinical course of therapy or diagnostic evaluation for the abnormal lipid levels or pre-abnormal lipid condition.

[0300] The present invention further provides in an electronic system and/or in a network, a method for determining whether a subject has abnormal lipid levels or a pre-disposition to abnormal lipid levels associated with a polymorphism as described herein wherein the method comprises the steps of determining the presence or absence of the polymorphism, and based on the presence or absence of the polymorphism, determining whether the subject has abnormal lipid levels or a pre-disposition to abnormal lipid levels, and/or recommending a particular treatment for the abnormal lipid levels or pre-abnormal lipid condition. The method may further comprise the step of receiving phenotypic information associated with the subject and/or acquiring from a network phenotypic information associated with the subject.

[0301] The present invention also provides in a network, a method for determining whether a subject has abnormal lipid levels, e.g., abnormally low HDL-C level, or a disease or disorder associated with abnormal lipid levels, e.g., a vascular or metabolic disease or disorder or a pre-disposition to abnormal lipid levels or a vascular or metabolic disease or disorder associated with a polymorphism, said method comprising the steps of receiving information associated with the polymorphism, receiving phenotypic information associated with the subject, acquiring information from the network corresponding to the polymorphism and/or abnormal lipid levels, and based on one or more of the phenotypic information, the polymorphism, and the acquired information, determining whether the subject has abnormal lipid levels or a pre-disposition to abnormal lipid levels or a vascular or metabolic disease or disorder. The method may further comprise the step of recommending a particular treatment for the abnormal lipid levels or pre-abnormal lipid condition.

[0302] The present invention also provides a method for determining whether a subject has a pre-disposition to abnormal lipid levels, a vascular disease or disorder, or a metabolic disease or disorder, said method comprising the steps of receiving information associated with the polymorphism, receiving phenotypic information associated with the subject, acquiring information from the network corresponding to the polymorphism and/or abnormal lipid levels, and based on one or more of the phenotypic information, the polymorphism, and the acquired information, determining whether the subject has abnormal lipid levels or a pre-disposition to abnormal lipid levels, a vascular disease or disorder, or a metabolic disease or disorder. The method may further comprise the step of recommending a particular treatment for the abnormal lipid levels or pre-abnormal lipid condition.

[0303] E. Personalized Health Assessment

[0304] Methods and systems of assessing personal health and risk for disease, e.g., abnormal lipid levels, e.g., abnormally low HDL-C level, or a disease or disorder associated with abnormal lipid levels, e.g., a vascular or metabolic disease or disorder, in a subject, using the polymorphisms and association of the instant invention are also provided. The methods provide personalized health care knowledge to individuals as well as to their health care providers, as well as to health care companies. It will be appreciated that the term “health care provider” is not limited to a physician but can be any source of health care. The methods and systems provide personalized information including a personal health assessment report that can include a personalized molecular profile, e.g., a genetic profile, a health profile, or both. As used herein, the term “health assessment” includes the assessment of health by any source of health care, including, but not limited to, a physician or a health care company. Overall, the methods and systems as described herein provide personalized information for individuals and patient management tools for healthcare providers and/or subjects using a variety of communications networks such as, for example, the Internet. U.S. patent application Ser. No. 60/266,082, filed Feb. 1, 2001, entitled “Methods and Systems for Personalized Health Assessment,” further describes personalized health assessment methods, systems, and apparatus, and is expressly incorporated herein by reference.

[0305] In one aspect, the invention provides an Internet-based method for assessing a subject's risk for abnormal lipid levels, e.g., abnormally low HDL-C level, or a disease or disorder associated with abnormal lipid levels, e.g., a vascular or metabolic disease or disorder. In one embodiment, the method comprises obtaining a biological sample from a subject, analyzing the biological sample to determine the presence or absence of a polymorphic region of a gene listed in Tables 1-5, and providing results of the analysis to the subject via the Internet, wherein the presence of a polymorphic region of a gene listed in Tables 1-5 indicates an increased or decreased risk for abnormal lipid levels. In another embodiment, the method comprises analyzing data from a biological sample from a subject relating to the presence or absence of a polymorphic region of a gene listed in Tables 1-5 and providing results of the analysis to the subject via the Internet, wherein the presence of a polymorphic region of a gene listed in Tables 1-5 indicates an increased or decreased risk for having or developing an abnormal lipid level.

[0306] It will be appreciated that the phrase “wherein the presence of a polymorphic region of a gene listed in Tables 1-5 indicates an increased risk for abnormal lipid levels” includes an increased or higher than normal risk of developing an abnormal lipid levels, e.g., abnormally low HDL-C level, or a disease or disorder associated with abnormal lipid levels, e.g., a vascular or metabolic disease or disorder indicated by a subject having any of the alleles listed in Tables 1-5, preferably one of the specific alleles listed in Table 5, or the complements thereof.

[0307] The terms “Internet” and/or “communications network” as used herein refer to any suitable communication link, which permits electronic communications. It should be understood that these terms are not limited to “the Internet” or any other particular system or type of communication link. That is, the terms “Internet” and/or “communications network” refer to any suitable communication system, including extra-computer system and intra-computer system communications. Examples of such communication systems include internal busses, local area networks, wide area networks, point-to-point shared and dedicated communications, infra-red links, microwave links, telephone links, CATV links, satellite and radio links, and fiber-optic links. The terms “Internet” and/or “communications network” can also refer to any suitable communications system for sending messages between remote locations, directly or via a third party communication provider such as AT&T. In this instance, messages can be communicated via telephone or facsimile or computer synthesized voice telephone messages with or without voice or tone recognition, or any other suitable communications technique.

[0308] In another aspect, the methods of the invention also provide methods of assessing a subject's risk for abnormal lipid levels. In one embodiment, the method comprises obtaining information from the subject regarding the polymorphic region of a gene listed in Tables 1-5, through e.g., obtaining a biological sample from the individual, analyzing the sample to obtain the subject's genetic profile, representing the genetic profile information as digital genetic profile data, electronically processing the digital genetic profile data to generate a risk assessment report for abnormal lipid levels, e.g., abnormally low HDL-C level, or a disease or disorder associated with abnormal lipid levels, e.g., a vascular or metabolic disease or disorder, and displaying the risk assessment report on an output device, where the presence of a polymorphic region of a gene listed in Table 5 indicates an increased risk for abnormal lipid levels, e.g., abnormally low HDL-C level, or a disease or disorder associated with abnormal lipid levels, e.g., a vascular or metabolic disease or disorder. In another embodiment, the method comprises analyzing a subject's genetic profile, representing the genetic profile information as digital genetic profile data, electronically processing the digital genetic profile data to generate a risk assessment report for vascular disease, and displaying the risk assessment report on an output device, where the presence of a polymorphic region of a gene listed in Table 5 indicates an increased risk for abnormal lipid levels, e.g., abnormally low HDL-C level, or a disease or disorder associated with abnormal lipid levels, e.g., a vascular or metabolic disease or disorder. Additional health information may be provided and can be utilized to generate the risk assessment report. Such information includes, but is not limited to, information regarding one or more of age, sex, ethnic origin, diet, sibling health, parental health, clinical symptoms, personal health history, blood test data, weight, and alcohol use, drug use, nicotine use, and blood pressure.

[0309] The digital genetic profile data may be transmitted via a communications network, e.g., the Internet, to a medical information system for processing.

[0310] In yet another aspect the invention provides a medical information system for assessing a subject's risk for abnormal lipid levels, e.g., abnormally low HDL-C level, or a disease or disorder associated with abnormal lipid levels, e.g., a vascular or metabolic disease or disorder comprising a means for obtaining information from the subject regarding the polymorphic region of a gene listed in Tables 1-5, through e.g., obtaining a biological sample from the individual to obtain a genetic profile, a means for representing the genetic profile as digital molecular data, a means for electronically processing the digital genetic profile to generate a risk assessment report for abnormal lipid levels, e.g., abnormally low HDL-C level, or a disease or disorder associated with abnormal lipid levels, e.g., a vascular or metabolic disease or disorder, and a means for displaying the risk assessment report on an output device, where the presence of a polymorphic region of a gene listed in Table 5 indicates an increased risk for having or developing an abnormal lipid level.

[0311] In another aspect, the invention provides a computerized method of providing advice, e.g., actionable advice or medical advice, to a subject comprising obtaining information from the subject regarding the polymorphic region of a gene listed in Tables 1-5, through e.g., obtaining a biological sample from the subject, analyzing the subject's biological sample to determine the subject's genetic profile, and, based on the subject's genetic profile, determining the subject's risk for abnormal lipid levels, e.g., abnormally low HDL-C level, or a disease or disorder associated with abnormal lipid levels, e.g., a vascular or metabolic disease or disorder. Advice, e.g., actionable advice, may be then provided electronically to the subject, based on the subject's risk for abnormal lipid levels, e.g., abnormally low HDL-C level, or a disease or disorder associated with abnormal lipid levels, e.g., a vascular or metabolic disease or disorder. The advice, e.g., actionable advice, may comprise, for example, recommending one or more of the group consisting of: further diagnostic evaluation, use of medical or surgical devices, administration of medication, e.g. lipid modulating medication, or lifestyle change, e.g., diet or exercise change. Additional health information may also be obtained from the subject and may also be used to provide the advice.

[0312] In another aspect, the invention includes a method for self-assessing risk for a vascular or metabolic disease or disorder. The method comprises providing information from the subject regarding the polymorphic region of a gene listed in Tables 1-5, through e.g., providing a biological sample for genetic analysis, and accessing an electronic output device displaying results of the genetic analysis, thereby self-assessing risk for abnormal lipid levels, e.g., abnormally low HDL-C level, or a disease or disorder associated with abnormal lipid levels, e.g., a vascular or metabolic disease or disorder, where the presence of a polymorphic region of a gene listed in Table 5 indicates an increased risk for abnormal lipid levels, e.g., abnormally low HDL-C level, or a disease or disorder associated with abnormal lipid levels, e.g., a vascular or metabolic disease or disorder.

[0313] In another aspect, the invention provides a method of self-assessing risk for a vascular or metabolic disease or disorder comprising providing information from the subject regarding the polymorphic region of a gene listed in Tables 1-5, through e.g., providing a biological sample, accessing digital genetic profile data obtained from the biological sample, the digital genetic profile data being displayed via an output device, where the presence of a polymorphic region of a gene listed in Table 5 indicates an increased risk for abnormal lipid levels, e.g., abnormally low HDL-C level, or a disease or disorder associated with abnormal lipid levels, e.g., a vascular or metabolic disease or disorder.

[0314] An output device may be, for example, a CRT, printer, or website. An electronic output device may be accessed via the Internet.

[0315] The biological sample may be obtained from the individual at a laboratory company. In one embodiment, the laboratory company processes the biological sample to obtain genetic profile data, represents at least some of the genetic profile data as digital genetic profile data, and transmits the digital genetic profile data via a communications network to a medical information system for processing. The biological sample may also be obtained from the subject at a draw station. A draw station processes the biological sample to obtain genetic profile data and transfers the data to a laboratory company. The laboratory company then represents at least some of the genetic profile data as digital genetic profile data, and transmits the digital genetic profile data via a communications network to a medical information system for processing.

[0316] In another aspect, the invention provides a method for a health care provider to generate a personal health assessment report for an individual. The method comprises counseling the individual to provide a biological sample and authorizing a draw station to take a biological sample from the individual and transmit molecular information from the sample to a laboratory company, where the molecular information comprises the presence or absence of a polymorphic region of a gene listed in Tables 1-5. The health care provider then requests the laboratory company to provide digital molecular data corresponding to the molecular information to a medical information system to electronically process the digital molecular data and digital health data obtained from the individual to generate a health assessment report, receives the health assessment report from the medical information system, and provides the health assessment report to the individual.

[0317] In still another aspect, the invention provides a method of assessing the health of an individual. The method comprises obtaining health information from the individual using an input device (e.g., a keyboard, touch screen, hand-held device, telephone, wireless input device, or interactive page on a website), representing at least some of the health information as digital health data, obtaining a biological sample from the individual, and processing the biological sample to obtain molecular information, where the molecular information comprises the presence or absence of a polymorphic region of a gene listed in Tables 1-5. At least some of the molecular information and health data is then presented as digital molecular data and electronically processed to generate a health assessment report. The health assessment report is then displayed on an output device. The health assessment report can comprise a digital health profile of the individual. The molecular data can comprise protein sequence data, and the molecular profile can comprise a proteomic profile. The molecular data can also comprise information regarding one or more of the absence, presence, or level, of one or more specific proteins, polypeptides, chemicals, cells, organisms, or compounds in the individual's biological sample. The molecular data may also comprise, e.g., nucleic acid sequence data, and the molecular profile may comprise, e.g., a genetic profile.

[0318] In yet another embodiment, the method of assessing the health of an individual further comprises obtaining a second biological sample or a second health information at a time after obtaining the initial biological sample or initial health information, processing the second biological sample to obtain second molecular information, processing the second health information, representing at least some of the second molecular information as digital second molecular data and second health information as digital health information, and processing the molecular data and second molecular data and health information and second health information to generate a health assessment report. In one embodiment, the health assessment report provides information about the individual's predisposition for abnormal lipid levels, e.g., abnormally low HDL-C level, or a disease or disorder associated with abnormal lipid levels, e.g., a vascular or metabolic disease or disorder, and options for risk reduction.

[0319] Options for risk reduction comprise, for example, one or more of diet, exercise, one or more vitamins, one or more drugs, cessation of nicotine use, and cessation of alcohol use. In one embodiment, the health assessment report provides information about treatment options for a particular disorder. Treatment options comprise, for example, one or more of diet, one or more drugs, physical therapy, and surgery. In one embodiment, the health assessment report provides information about the efficacy of a particular treatment regimen and options for therapy adjustment.

[0320] In another embodiment, electronically processing the digital molecular data and digital health data to generate a health assessment report comprises using the digital molecular data and/or digital health data as inputs for an algorithm or a rule-based system that determines whether the individual is at risk for a specific disorder, e.g., abnormal lipid levels, e.g., abnormally low HDL-C level, or a disease or disorder associated with abnormal lipid levels, e.g., a vascular or metabolic disease or disorder. Electronically processing the digital molecular data and digital health data may also comprise using the digital molecular data and digital health data as inputs for an algorithm or a rule-based system based on one or more databases comprising stored digital molecular data and/or digital health data relating to one or more disorders, e.g., abnormal lipid levels, e.g., abnormally low HDL-C level, or a disease or disorder associated with abnormal lipid levels, e.g., a vascular or metabolic disease or disorder.

[0321] In another embodiment, processing the digital molecular data and digital health data comprises using the digital molecular data and digital health data as inputs for an algorithm or a rule-based system based on one or more databases comprising: (i) stored digital molecular data and/or digital health data from a plurality of healthy individuals, and (ii) stored digital molecular data and/or digital health data from one or more pluralities of unhealthy individuals, each plurality of individuals having a specific disorder. At least one of the databases can be a public database. In one embodiment, the digital health data and digital molecular data are transmitted via, e.g., a communications network, e.g., the Internet, to a medical information system for processing.

[0322] A database of stored molecular data and health data, e.g., stored digital molecular data and/or digital health data, from a plurality of individuals, is further provided. A database of stored digital molecular data and/or digital health data from a plurality of healthy individuals, and stored digital molecular data and/or digital health data from one or more pluralities of unhealthy individuals, each plurality of individuals having a specific disorder, e.g., abnormal lipid levels, e.g., abnormally low HDL-C level, or a disease or disorder associated with abnormal lipid levels, e.g., a vascular or metabolic disease or disorder, is also provided.

[0323] The new methods and systems of the invention provide healthcare providers with access to ever-growing relational databases that include both molecular data and health data that is linked to specific disorders, e.g., abnormal lipid levels, e.g., abnormally low HDL-C level, or a disease or disorder associated with abnormal lipid levels, e.g., a vascular or metabolic disease or disorder. In addition public medical knowledge is screened and abstracted to provide concise, accurate information that is added to the database on an ongoing basis. In addition, new relationships between particular SNPs, e.g., SNPs associated with abnormal lipid levels, e.g., abnormally low HDL-C level, or a disease or disorder associated with abnormal lipid levels, e.g., a vascular or metabolic disease or disorder, or genetic mutations and specific discords are added as they are discovered.

[0324] The present invention is further illustrated by the following examples which should not be construed as limiting in any way. The contents of all cited references (including, without limitation, literature references, issued patents, published patent applications and database records including Genbank™ records) as cited throughout this application are hereby expressly incorporated by reference. The practice of the present invention will employ, unless otherwise indicated, conventional techniques of cell biology, cell culture, molecular biology, transgenic biology, microbiology, recombinant DNA, and immunology, which are within the skill of the art. Such techniques are explained fully in the literature. See, for example, Molecular Cloning A Laboratory Manual, 2nd Ed., ed. by Sambrook, Fritsch and Maniatis (Cold Spring Harbor Laboratory Press: 1989); DNA Cloning, Volumes I and II (D. N. Glover ed., 1985); Oligonucleotide Synthesis (M. J. Gait ed., 1984); Mullis et al. U.S. Pat. No: 4,683,195; Nucleic Acid Hybridization (B. D. Hames & S. J. Higgins eds. 1984); Transcription And Translation (B. D. Hames & S. J. Higgins eds. 1984); Culture Of Animal Cells (R. I. Freshney, Alan R. Liss, Inc., 1987); Immobilized Cells And Enzymes (IRL Press, 1986); B. Perbal, A Practical Guide To Molecular Cloning (1984); the treatise, Methods In Enzymology (Academic Press, Inc., N.Y.); gene Transfer Vectors For Mammalian Cells (J. H. Miller and M. P. Calos eds., 1987, Cold Spring Harbor Laboratory); Methods In Enzymology, Vols. 154 and 155 (Wu et al. eds.), Immunochemical Methods In Cell And Molecular Biology (Mayer and Walker, eds., Academic Press, London, 1987); Handbook Of Experimental Immunology, Volumes I-IV (D. M. Weir and C. C. Blackwell, eds., 1986); Manipulating the Mouse Embryo, (Cold Spring Harbor Laboratory Press, Cold Spring Harbor, N.Y., 1986).

### EXAMPLES

### Example 1

[0325] Identification of Polymorphic Regions of Genes Associated with Abnormal Lipid Levels

[0326] Population

[0327] All cases were drawn from the GeneQuest study, a collection of families with premature coronary artery disease. Subjects in the GeneQuest study all had premature coronary artery disease identified at one of 15 participating medical centers, fulfilling the criteria of either myocardial infarction, surgical or percutaneous revascularization, or a significant coronary artery lesion diagnosed before age 45 in males or age 50 in females and having a living sibling who met the same criteria. For this study, one individual per family was selected for genotyping. The final sample was comprised of 352 Caucasian individuals with a personal and family history of premature CAD.

[0328] Methods

[0329] Variant Discovery

[0330] Most of the allelic variants of the present invention were identified through denaturing high performance liquid chromatography (DHPLC) analysis, variant detector arrays (Affymetrix™), the polymerase chain reaction (PCR), and/or single stranded conformation polymorphism (SSCP) analysis using PCR primers complementary to intronic sequences surrounding each of the exons, 3′ UTR, and 5′ upstream regulatory element sequences of the genes. The polymorphic regions of the present invention have been identified in the genes by analyzing the DNA of cell lines derived from an ethnically diverse population by methods described in Cargill, et al. (1999 Nature Genetics 22:231-238).

[0331] Genotyping

[0332] Oligonucleotides primers and probes were designed using Primer Express v1.5 (Applied Biosystems, Inc.). Two types of TaqMan probes were used: “TAMRA” assays (FAM and TET reporter dyes; TAMRA quencher dye); and “MGB” assays (FAM and VIC reporter dyes; dark quencher; minor groove binding group on 3′ end).

[0333] PCR reactions contained 900 nM primers, 200 nM TET probe, 100 nM (TAMRA assays) or 200 nM (MGB assays) FAM probe, 8 ng genomic DNA and 3 uL TaqMan Universal PCR Master Mix (Applied Biosystems, Inc.) in a 5 uL reaction volume Thermocycling conditions were as follows: 1 cycle of 95° C. for10 minutes, 40 cycles of 92° C. for 15 seconds and 62° C. for 1 minute, 1 cycle of 20° C. for 1 minute. Following thermocycling, endpoint fluorescence values for allele specific probes were quantitated using a SpectroMax Gemini XS spectrophotometer (Molecular Devices, Inc.). Genotypes were assigned based on a scatter plot of normalized fluorescence values.

[0334] Statistical Analysis

[0335] The association of HDL-C with each SNP was assessed in a general linear model, implemented in the PROC GLM procedure in SAS. Each SNP was entered into the model using a class statement to define it as an unordered categorical variable. Significance was determined for the SNP, taking into account all three genotypes, with the F statistic. In those cases where the homozygous variant genotype was rare (<5 observations), heterozygous and homozygous variant genotypes were pooled. Mean and standard deviations of HDL-C are reported for each genotype.

[0336] All SNPs were evaluated alone, and in a model testing for interaction between the SNP and sex. For those SNPs where significant (p<0.05) interaction was found, mean values of HDL-C by genotype were presented separately for males and females. Significance of the association of each of these SNPs with HDL-C was assessed with the F statistic.

[0337] Multivariate analysis was carried out with a backwards stepwise procedure, beginning with all SNPs found to be significantly associated with HDL-C in univariate analyses.

[0338] Linkage disequilibrium was assessed with the normalized disequilibrium parameter, D′, using the EM algorithm.

[0339] Results

[0340] Significant associations between HDL-C and variants in nine genes (Table 2) were identified. Associations between HDL-C and variants in ten additional genes were found when males and females were analyzed separately (Table 3). These SNPs, identified through significant SNP by sex interaction, usually conferred the opposite effect in males and females. However, the effect in females was typically stronger, resulting in significant associations despite the smaller sample size.

[0341] For some genes multiple SNPs were typed. In some cases, SNPs in a gene were highly correlated, or in linkage disequilibrium, and yet not all of these SNPs showed significant (p<0.05) associations with HDL-C. Table 4 lists additional SNPs which are in linkage disequilibrium with the associated SNPs even though they themselves did not reach statistical significance. Table 5 provides a summary of the SNPs associated with abnormal HDL-C level, e.g., low HDL-C levels.

[0342] For two genes where multiple SNPs were typed, more than one SNP showed a statistically significant association with HDL-C. In the LIPC gene, both the LIPC_{—}1 and LIPC_{—}5 SNPs were associated with HDL-C. These two SNPs are not in linkage disequilibrium (D′=0.10, p=0.37). Therefore, they represent independent risk factors. Similarly, in the LRP1 gene, two SNPs were significantly associated with HDL-C, LRP 1_{—}1 and LRP1_{—}3. These SNPs are not in linkage disequilibrium either (D′=-0.13, p=0.49) and therefore represent independent associations.

[0343] Results from a multivariate analysis (Table 6 and Table 7) revealed that different genes may influence HDL-C levels in males and females. In females, five genes were independently associated with HDL-C including COL5A2, F2, CD14, VWF, and ITGB3. The combination of these five genes account for approximately 65% of the variability in HDL-C. In males, a different combination of three genes was identified. COL5A2, CD14 and FABP3 were independently associated with HDL-C and together account for approximately 21% of the variation in HDL-C in males.

TABLE 6
Final model for genes associated with HDL-C in males.

| | Parameter | Standard | | |
|---|---|---|---|---|
| Variable | Estimate | Error | F Value | Pr > F |
| Intercept | 44.46214 | 1.98821 | 500.10 | <.0001 |
| COL5A2_1_AG | 2.10359 | 2.12880 | 0.98 | 0.3253 |
| COL5A2_1_AA | 25.90332 | 7.42166 | 12.18 | 0.0007 |
| CD14_1_CT | −6.42302 | 2.31371 | 7.71 | 0.0065 |
| CD14_1_CC | −5.30791 | 2.74417 | 3.74 | 0.0557 |
| FABP3_1_TC | −10.70610 | 3.63809 | 8.66 | 0.0040 |

[0344] Male subjects having or at risk for developing the lowest levels of HDL-C are those with the following combination of genotypes: COL5A2_{—}1 GG, CD14_{—}1 CT or CC and FABP3_{—}1 CT. This combination is predicted to result in a mean HDL-C level below approximately 29 mg/dl. Based on individual genotype frequencies, this combination is estimated to have a frequency of approximately 4% in a general U.S. Caucasian population.

TABLE 7
Final model for genes associated with HDL-C in females.

| | Parameter | Standard | | |
|---|---|---|---|---|
| Variable | Estimate | Error | F Value | Pr > F |
| Intercept | 52.56006 | 3.13836 | 280.48 | <.0001 |
| COL5A2_1_AG | 9.41856 | 3.17158 | 8.82 | 0.0054 |
| COL5A2_1_AA | 10.41297 | 6.42627 | 2.63 | 0.1141 |
| CD14_1_CT | −11.89890 | 3.30875 | 12.93 | 0.0010 |
| CD14_1_CC | −4.86941 | 3.64396 | 1.79 | 0.1901 |
| VWF_2_GA | −12.28175 | 3.53269 | 12.09 | 0.0014 |
| F2_1_CT | 1.62957 | 3.35462 | 0.24 | 0.6302 |
| F2_1_TT | −25.10920 | 8.86448 | 8.02 | 0.0076 |
| ITGB3_4_TC | −11.56171 | 2.83489 | 16.63 | 0.0002 |
| ITGB3_4_TT | 20.82224 | 5.48327 | 14.42 | 0.0006 |

[0345] The frequencies of the genotypes conferring the lowest levels of HDL-C for each of these SNPs was remarkably high. One exception is for the F2_{—}1 SNP. For the F2 SNP, the homozygous variant genotype (TT), which has the effect of lowering HDL-C by 25 mg/dl, has a frequency of only 1%. For the four remaining SNPs, female subjects having or at risk for developing the lowest levels of HDL-C are those with the following combination of genotypes: COL5A2_{—}1 GG, CD14_{—}1 CT, VWF_{—}2 GA and ITGB3 4 TC. This combination is predicted to result in a mean HDL-C level of approximately 16.8 mg/dl. Based on individual genotype frequencies, this combination is estimated to have a frequency of approximately 3% in a general U.S. Caucasian population.

[0346] Equivalents

[0347] Those skilled in the art will recognize, or be able to ascertain using no more than routine experimentation, many equivalents to the specific embodiments of the invention described herein. Such equivalents are intended to be encompassed by the following claims.

What is claimed is:

1. A method for determining whether a subject has, or is at risk of developing, an abnormally low HDL-C level, comprising determining whether the subject has an allelic variant of a polymorphic region listed in Table 5, to thereby determine whether the subject has, or is at risk for developing, an abnormally low HDL-C level.

2. The method of claim 1, wherein said allelic variant is APOA_{—}1 CC, CD14_{—}1 CT, COL5A2_{—}1 GG, EDNRB_{—}1 AG or AA, FABP3_{—}1 CT, GBE1_{—}1 AG or GG, LIPC_{—}5 AA, MTHFR_{—}1 CC, VWF_{—}2 GG, or the complements thereof.

3. A method for determining whether a male subject has, or is at risk of developing, an abnormally low HDL-C level, comprising determining whether the male subject has an allelic variant of a polymorphic region listed in Table 5 which is associated with abnormally low HDL-C levels in males, to thereby determine whether the male subject has, or is at risk for developing an abnormally low HDL-C level.

4. The method of claim 3, wherein said allelic variant is LRP1_{—}3 CC or CT, PAI2_{—}4 GG, or PPARG_{—}1 CG, or the complements thereof

5. The method of claim 3, wherein said allelic variants are COL5A2_{—}1 GG, CD14_{—}1 CT or CC, and FABP3_{—}1 CT, in combination, or the complements thereof.

6. A method for determining whether a female subject has, or is at risk of developing, an abnormally low HDL-C level, comprising determining whether the female subject has an allelic variant of a polymorphic region listed in Table 5 which is associated with abnormally low HDL-C levels in females, to thereby determine whether the female subject has, or is at risk for developing an abnormally low HDL-C level.

7. The method of claim 6, wherein said allelic variant is AT3_{—}1 AG or AA, F2_{—}1 TT, ITGB3_{—}4 TC, LIPC_{—}1 AG or AA, LRP1_{—}1 GT or TT, PPARG_{—}1 CC, PRCP_{—}1 CC, THBS4_{—}1 GG or GC, or the complements thereof.

8. The method of claim 6, wherein said allelic variants are COL5A2_{—}1 GG, CD14_{—}1 CT, VWF_{—}2 GA, and ITGB3_{—}4 TC, in combination, or the complements thereof.

9. The method of claim 1, wherein determining the identity of the allelic variant of a polymorphic region comprises contacting a nucleic acid of the subject with at least one probe or primer which is capable of hybridizing to a gene listed in Table 5.

10. The method of claim 3, wherein determining the identity of the allelic variant of a polymorphic region comprises contacting a nucleic acid of the subject with at least one probe or primer which is capable of hybridizing to a gene listed in Table 5.

11. The method of claim 6, wherein determining the identity of the allelic variant of a polymorphic region comprises contacting a nucleic acid of the subject with at least one probe or primer which is capable of hybridizing to a gene listed in Table 5.

12. The method of claims 9, 10, or 11, wherein the probe or primer is capable of specifically hybridizing to an allelic variant of the polymorphic region.

13. The method of claims 9, 10, or 11, wherein the probe or primer has a nucleotide sequence from about 15 to about 30 nucleotides.

14. The method of claims 9, 10, or 11, wherein the probe or primer is a single stranded nucleic acid.

15. The method of claims 9, 10, or 11, wherein the probe or primer is labeled.

16. The method of claims 1, 3, or 6, wherein determining the identity of the allelic variant of a polymorphic region is carried out by allele specific hybridization.

17. The method of claims 1, 3, or 6, wherein determining the identity of the allelic variant of a polymorphic region is carried out by primer specific extension.

18. The method of claims 1, 3, or 6, wherein determining the identity of the allelic variant of a polymorphic region is carried out by an oligonucleotide ligation assay.

19. The method of claims 1, 3, or 6, wherein determining the identity of the allelic variant of a polymorphic region is carried out by single-stranded conformation polymorphism.

The application's sequence listing, which the Patent Office published only in electronic form, follows.

SEQUENCE LISTING (49 sequences)

SEQ ID NO: 1 - DNA, 31 bp, Homo sapiens
  misc_feature 16: N = C or T
tgataagcccagcccnggccctgttgctgct

SEQ ID NO: 2 - DNA, 31 bp, Homo sapiens
  misc_feature 16: N = G OR A
gagcctggccaaggtngagaaggaactcacc

SEQ ID NO: 3 - DNA, 31 bp, Homo sapiens
  misc_feature 16: N = C OR T
tccttcctgttacggnccccctccctgaaac

SEQ ID NO: 4 - DNA, 31 bp, Homo sapiens
  misc_feature 16: N = G OR A
cccaacgggctctccnggtacctctggtcct

SEQ ID NO: 5 - DNA, 31 bp, Homo sapiens
  misc_feature 16: N = G or A
ctcttaccatctgtcngtggtgttgatgaga

SEQ ID NO: 6 - DNA, 31 bp, Homo sapiens
  misc_feature 16: N = G or A
aaaagattggtggctnttcagtttctatttc

SEQ ID NO: 7 - DNA, 31 bp, Homo sapiens
  misc_feature 16: N = C OR T
ccgacagcagcaccangggaccctggtgcta

SEQ ID NO: 8 - DNA, 31 bp, Homo sapiens
  misc_feature 16: N = G OR A
ctgcctcctgtacccnccctgggacaagaac

SEQ ID NO: 9 - DNA, 31 bp, Homo sapiens
  misc_feature 16: N = T or C
aaggtgctgtgtgttnttagggtgagaatgt

SEQ ID NO: 10 - DNA, 31 bp, Homo sapiens
  misc_feature 16: N = A or G
aacatgagtgtcctgnctccttttactccag

SEQ ID NO: 11 - DNA, 31 bp, Homo sapiens
  misc_feature 16: N = T or C
ctcccgggggctgcantcgtcctgctgggaa

SEQ ID NO: 12 - DNA, 31 bp, Homo sapiens
  misc_feature 16: N = C or T
tgcagacgggctgacnctcccgggggctgca

SEQ ID NO: 13 - DNA, 31 bp, Homo sapiens
  misc_feature 16: N = G or A
cctcaggtggacggcntgctagaaaactgga

SEQ ID NO: 14 - DNA, 31 bp, Homo sapiens
  misc_feature 16: N = G or A
acacagtagctttaanttgattaatttggaa

SEQ ID NO: 15 - DNA, 31 bp, Homo sapiens
  misc_feature 16: N = G or T
cccaacggcatctcantggactaccaggatg

SEQ ID NO: 16 - DNA, 31 bp, Homo sapiens
  misc_feature 16: N = C or T
cttccggctgaaggangacggccggacgtgt

SEQ ID NO: 17 - DNA, 31 bp, Homo sapiens
  misc_feature 16: N = C or T
tgagggcgagctctgnggtgaggcctggtcc

SEQ ID NO: 18 - DNA, 31 bp, Homo sapiens
  misc_feature 16: N = T or C
ctacagcactgaggcngagttcgaggagccc

SEQ ID NO: 19 - DNA, 29 bp, Homo sapiens
  misc_feature 14: N = C or T
gatttcatcatcangcagcttttctttga

SEQ ID NO: 20 - DNA, 31 bp, Homo sapiens
  misc_feature 16: N = G or C
tagttttagggtgagnaaaatctgccgaaaa

SEQ ID NO: 21 - DNA, 31 bp, Homo sapiens
  misc_feature 16: N = G or C
gaaaaataaaatgcanttggttatcttatgc

SEQ ID NO: 22 - DNA, 31 bp, Homo sapiens
  misc_feature 16: N = G or C
atctagaagcaaaganaggaagaaaaaaaca

SEQ ID NO: 23 - DNA, 31 bp, Homo sapiens
  misc_feature 16: N = G or C
aggaatcgctttctgngtcaataggagaatc

SEQ ID NO: 24 - DNA, 31 bp, Homo sapiens
  misc_feature 16: N = G or C
gtgactgcaaccagantgtctgtgatatcct

SEQ ID NO: 25 - DNA, 31 bp, Homo sapiens
  misc_feature 16: N = G or C
gagtgtcgaaatggancgtgcgttcccaact

SEQ ID NO: 26 - DNA, 31 bp, Homo sapiens
  misc_feature 16: N = G or A
acagtcattggtggcngttgaggccaagtac

SEQ ID NO: 27 - DNA, 188971 bp, Homo sapiens
  misc_feature 145329-145428, 187896-187995, 195894-195993: N = any nucleotide
cggaattccttctccttcccaccccctcccccaacctctccatcaatccaaatccgccctctgttaaagcctcctgtgagccccctcctcccagaatcccccctgagccctccagcctccagaggcctctctcccctctggtctcgctgcctcacccacttagctctcggtgcacacagctttgtgttagattctgtttctcctcaagacaatctaatagcaagatccacagcttttacttctcttatgtcctccacgatgtctagcgcagttctggatatagagcaggggcaggagagcaacagaaagaggttgagctacaaataaaatgaacctgcttccagccagtgccctgtggagcactgggtcctagatgtgacaatctgagggcccccatccggccagggcctggctgccagaggccaggagagaaggcagaggcctcaggccaggaggctccactgagtgtggagagggggaaaggggcaggaacaatttcaaaccacatagcagctccctgagaaggataaggggcctctgaaccaggccagaaaccaacctgagccaggagcactgggccgagagcacatccaggtcagacacaagaagttcagagcaggagcggacagaagccgatggaaataggcaagctaggctcagagagcagggcggatcagcctacctatctggcagtgagagggacaatgtgggctctcacacaaagcgacagacacccatgaggatgagggcaaggctaagcgggggtgggggagcaaagagagaagagattaagaaggcagggaaagggagggctggagcgggagggtgagagaagacagagaaagggtgtggggaggagaggagaggcggggatttctcccttgacagccaccgtggaaataccacaatccctagatgactcctagcccaccagggttaaggtgaggtgagaagatggcaacaccccacccccctggccaccacaactaagaaattatgtagagtaattaatcaaaagctaatgagaaatgtgttttctctcccagcctagccccacatcatattcttattagctgaggttattacaatagtaatcatgcatgctccaggtgcaaattgggttttgtgctccactgccaccaatttagaaaaccattaatggcaagataaagcccccatggctcccgccaggctgagccgaatcaacctcctgcaggttccttgctcccagggccgcacgcccattgtccagggggcgctcttctgagcatcccaggaatcaggaggcctgcaggcaggagacaaacactgagggtgggtgggacaggggctgggcctggggtggaagatcttagacctctctctctctctctctgtctacacacacacacacaccggtgtagttgctagggcagagatagctccatgaaacaaagtataaagccaggtctgcctgggaggtccaaccttcccaattttctcttgagcccttcccccttgtgaacctgccctctggaaagggttaactaaatctgtggttcccaaacacaggtacacaaccaggggctgcccttgataaagtttccactagtaaaaagaagggcaatgtagtacatttttcacaaagctaaatgtactcaattttatagatgttctttttcttttttcttttctttttttttaagatggcgtttcactctgttgcccaggctggagtgcaaaggcgcagtctcggctcactgcaacctccgcctcacgggttcaagtgattctcctgcctcagcctcctgagtagctgggattataggcgtgcgccaccatgccaggctaatttttgtatttttagtagagatggggtttcaccatgttggccaggctggtcttagactcctgacctcaagtgatccgcccaccttggcctcccaaaatgctgggattacaggtgagccaacgcacccggcctagacgttcttttgtgtacttagagagcattgtgatagtatatagatgttcttaattctgaaattgtccttcctattttgtttgtggttttatatccatacatatacttgtgtgtgtgtgtgtgtgtgtgtgtgtgtgtgtgtgtgtaaggtatatatataaccttaccttattactcaggactcattcagctgcagggaatggatttaaaattatattgtaaaattggagatgtattggttcacataactagaaagaacatgggaaaagcagaagtcagatggtgttgtcaggcctctctccccttctccagctctctttgcattgtccttcttctgtcttactaaatttgagcttcctccctggggcagcgtcatggaaagaatggcccctgggctagcatggccaaaggctgctctggggtacattgtcactgcttaagatctcagagaagagagagctttgttctccctccacacccatggaaaagttcagggcagggctccgacggtctcaccttgggccatatatacattctaaggccaatcactgtgggattggcatgttggccagatctgagtcataggattactcctgagacaaggtaacagctctgcccttctgccccactagaatagggcaacagtcagtgctctagaggaggcaggaatatggtcattgaaaaacaggggtaagggatcccgggcaaagaccacagacatccactatacccagaaaattaaaataagaagaagaaagtcttgggagctcctgggtcaaacactgagccaccacgaaatgtcagagactattttgcccatgcaaatctcccaggattcacatagaagaaagttacattacactaaccaaagcaatgaggtgccaatggtaagttctcagcaaactcactagttgagctgaatatcagagggcctgtctgtgacagcagaacatattggtgattcctccaacccattccagattattctgcacagaaaaccaaagtgtcgatctagaagatgttcatagccatagtgcgatgagagtaagcagagtggtggagagcaatttctttacagaggaaacattccaggggcccaaagacctcatggaaatccagtcaagacaatatttccagaatactaagcccttgggcaaaatgacctccccatggtcccacagagtcagcatgcctatggctcatccagtcaatagatcagaagtatgctcagaacatccttctcttaaggggtgctggtttggttgtttctatcatttattattatttagtagtttgaacctgttacctgcataagtctccccaattaataaactgcccccataggcctgactttgaagtctgtctctatttttttttttttaagacggagtgcagtggcctgatcacagctcactgcagcctcaacttcctaggctcaagtggtcctttcatctcagcctcccgagtagctaagactataggtgcgcaccaccatgcccagctaatttttgggttttatttttttgtttctttgtttgtttgtttttgtgacggagtctcgctctgtcgcccaggctggagtcccgagtagctaagactacaggtgcacaccaccatgcccggctaatttttgggttttgtttgtttgtatgtttgtttgttttttgagacagagtcttgctctgtcacccaggctggagtacagtgacactatctcggctcactgcaacctccgcctcccaagttcaagtgattctcctgcctcagcaccccgagtagctaggactacatgtgcacgccaccacgcctggctaatttttggatttttttagtacagattgggtttcaccatattggccaggctactctcgaactcctgacctcatgatctgcccgcctcagcctcccaaagtgctgatattataggcgtgagccactgtgcccagcctctaatttttgtatttttagtggagacaaggtttcaccatgttgcccaggctggtgtctccacttcttactggctatttggctttgagaaaaactagttggcctccctgaccctcaattccttcatctgtaaaatgggaatatacctccatgcaccttcataactggcctgagaacacccaggaggcccagagacactcttacattgtctggattcacttcactgagcacttactaagtatcaggcactgtgtaaggcagtgtgtgtgaagtgaggacttaggtggaggtctccctaagaatggtggcgagaaaagacccatgcccaacatgcatgatgcaaaagagagcgggatacatgcataagcaaggcatgaaccaagcgctgtgggcatttagggaaagaaggtattgcttccagctagtggatagggcagatttggtggaggaggcttcttctctggtctggaaggacaggtgaaatgtggtgatgaagaaggtagggcattccacagaggcaacagcccacactgagatctggagatgagaatactaagaaggcggggagagtacctcccctgaatctggagaaggaaggcagcagttggaagggtcctctcttctgggccatccgcttcctcctccactaccatatagctctaccctctccactgtgtgttcatgggtgatgttagctgggcacagccaagggatggcatggaagaggggttatctcagggcctgtcctagagaagcttgggcctaggacaccctcaacaggaccatacatgtaccacccccgttctgccacctccctttatctgcctctccagcttggccaaggttcagtggtgctaattagcagcagttagctcagctcccccatccggcccctccgccagggcagggacgtgactgatcactgaggtttcctttctctcctgcagggaagacacagcaggaagctagaggcagggggcaagaggaaggagaagcagctccaggagttagctgaggtggataatagagagggaatggactttgtttggactaaacattgtcataggcttaaagagctgaaggcttctctagctcctgcttgggcaggacttctgataataagaactcctagcaagaaagtgcttgtaaaacccctctcctacactgtctcattagtttagtccccaaacagccatagaagacaggcattatcattatattatcattattattgttattattacttaatgtctttcttccttggtcaatctaagatccacaaggggcagggatcatgtcaaccttgtcacgctgtgtatcctcagtgccacataccgtgcccagcatagaggtgacattcaataaatagttgctgggtgggtgggtggatggatggaaggatggatagatggaataatggatggacagaaaggcaggtggatgaaggataaattatcccattttacaaattaagaaactaaggaccagagagaaaaagtgacttacccaagactaatcagacagcgagtgacagagcagcacccagtcccagttcacagcctccccatcgggcctgctcgcaatactcaaactgtctctcttctttgatttcttgaacacaatccaccaagaaaggtccacccttctgaagatctgattctcatccttcttccagcagctggtcagaagccaagctcctgccaactcggctcccataaaaagagcaggatcccgagagcctagtgaccagggactagagacacagaggccctttctgatcactggtctggaagaatctggctgccaactggtgaggtaaaggtagacagcgacagccagagtgcaagtgcccatggaagagctggcaccgacggccctgtgtgagcagcacagcactaggaatcacacagatgccagttcaaagccccagcacttgcccttccacaagcacctgcctctgcaacgtcttcccttctttcctccacctccatgcccctcactcccaacttctccaagcccagtctccttattgatagcatggagtcatgacggctctcacacacattcctctgaaggttgaattcgaggaggtgatgggtcctttcacacccaagtctggtgattttctcacagcagcctccctgccccacctcctgaccccgcccaccaccctaagggatggaagttcttcgtgcctggttctgttcctacctctgcccccagtgccacatcagagccctctcccctttggctctgtgttctgaggcagcagcctgcttaccttcgcagtcccaggatcagtcctccgtctccagacaaaacctctcccacagagggttctgtcttcctaggaggccccctcagatttcccacatagaccctgggcgggccatctggctcccactgtccctgttgccctctcttcctgtctggtttttctaaagcccacatgtctttgcccagaccgggcaggaatcctctacctcaggcccaggagcccaaagcaggcctcattgcattggggtttggaggcgcacctgcacattttccaggaaagggatctgtagctagagggaacctccctagaaagcttgagattcactgcctggagaccccctcccaccttccactctgccatgaaagacagctcaggtttcatccactgtaactcagtgtgaattttgccctttcaggtgccctgttaacatgattcctcccacctggcctgacacctatgtggatttcaagggcataaggctctgccacttaaatcgcctcaacacccctgtcccttcccccgactgtggtcctcagcacaggacatggccttactgctccaccacgtgcttagtattcaagccatgcgctgccaccatgcttcccaccatgtctcctccaaagcagagccttccgcggtgtgccctgcaaggtcctagtgggtatccttgatgagaactagattctgtacacagtggatgctgcatcaatactgtggccacttagaggttagagggtgtattagtcagggttctctagagggacagacctaatggaatagatatatatataaaggagagtttgagtattaacatattaactcacatgatcacaaggtcccacaataggccatctgaaggctgaggagcaaggagagccagtccgagttccaaaactgaagaacatggagtccagtgttcgagggcaggaagcatccagcacggcagaaagatgtaggccagggggctaggccagtctctcttttcacatttttctgcctgcttatattctagttgcactggcagctgattagatgctgattagatgcccacccagatgaagggtgggtctgcctttcccagcccactgactcaaatgttaatctcctttggcaacacagttacaaacacacgcaggatcaatactttgtatccttcaagccaatcaagttgacactcagtattaaccatcacagagggcctatggttacagcagatggaaatggggaccctggtaaaagtggggatgctgtagaatcctggagttaacctctgaaagagatccaaagaggtcatctgattcaaaaaaattacttctttagtcccttccatgtacctaacaccggagacacaaagatagacaaggcatggtccactgagatgaaattagtgttattcctgttgtacagaagaggcaactgaagccaggtaaaggttaatgtctgtctaacttaccagcagctggtaagtaaaggggaggaactagataatactcaagtgccctggcttctttggttgattcaagggttcaaaatatgcccccagtgtagctgccagccttggggccagcctctgtgtcctgctccagatgtggcagaatgactgggagggttgcctgcgagtgggcagactctagcactatcaagtctctgttttgcctgaggcacatacagggctcctggcagaggagagtgggcgagaagctgggaagccacagcctgtgaatgcaaatgaggctattgcataattaattaacatcaaacagtttcattaagagatggagctgtgcggcggtttgtcttgaaaaaaaattgaaacaacagaattgggacaagagaatggaggttccaaccacctggacctaactcagaagcgaacaattctaaccactgagggtggcgagggtggcttcagcccccaaatcttacatgtgggctttctggagctcctgttgtccctcctggcacctccatccaggcctcctccaggagctgaggtttggggaaggatggtgggcactgccaggcggagttcagggacccacagcagcagagtgggagctcactgggaacagaaatccctagctttgaacagtggctttgcccagggagggtgcagacaccctagacacactccaagactcatgcgctcaggctccaaaatggtctcaaagcactgtgggacagaaagaagccacttggaaaaaccaaatcagggctctatttatctctaaatctccatttctcctccccttcccaccccaacacccactctttcactctaaaatcccctgtcctctaagaaaaagggcaggggaacagggatctccttgccacgccttctaggagttaatcccacaaggaaggagcctccttgggaaccaggccatagggagtggccccccagttgcctgggctaagatcccatgggcaagggaggtcacctcttagaagaaatcctatcaacccttcatgacctggctcccgcttctctttccagctgcctcctcattctccctgtgtttcatccctatcaaggcactgcccattccccagcagccacagcctctcatgcttcctgccatccctcctgctgaaagggccttcctacactccatcttagcagcctagggagctcctcctgtttcatcagtgcccagtttaaatacccctcctctggaaaacctgccctgactgcccacaccctacaagattaggtattttttttcccctacgctctgcacagtttgtgttgtaattatttgtttacttcactgagacaatgagctccttgaaggcaggaaccattatctttcttcagctttgtatcactaagacctgggctagactttaaaagtctgtctaacgaatacatatttgaactaaaaagatcacagatacctcgtctagatgcctgactcttgacaaatgtctaaactgttcagaatgagacatttattcccttcctgactgtatctccaatccctgcgattgagaagcagtggggatgggagacgtgaccctcagcagggtgagtttctaggatcgtgagcccaaaggccccgggtagttcctaacagggaggtgcctcgggctgagcagctgctgctgctccatggcaaaggcttgcggtgctggagagagccacaggctctcttccccaggtcgggggcccaggtgacccatccagttgttgtgcaggaatatggaggggctgaagggatcccagtacctctggacttccacagcagccgggccccttagagcatgccacacagccagccacagccctgcctgcccaccacaagggcctcccacccagcatcctctcctctcctgcccaccctctcctgctcccccaaacctgctgacccctggtggctttagccttccttgagagagccagaagggagagcatccattttaaattaacaaggttattagcagttaattacctgaggtatcattgtaattgaaaagaaaaggagagaagagaagctcataaacccaaccctttcttttcaccatccctggggtggtgcgggtgaccccggccccctccccacaatagggccctgcacacaccattgtcctttctttctccatgttcctccacctgcccccacttcacagggatattgaggagagggaaccagacccaaggagagcaagccacccgccccgcaggcacttcagggatgctgagacacacttggagtccataaatgcagagagatttatctcatattggggtgtgcagggaggaggcacaaatctgaagcctttagtcaatatttttagtgatttttttttcccctagattgtcctgttattctacaagttagtatggctggcatctgtcagcattaatgatgtttagtcccaaattcactgcaaccagagatcacagaccatctcccctccctcctccccactgccacccacccctgccctgaggacactgggctgcagggaggggaaggggtgcagagagaacacagaagacccctccctcaggctggccatgtgaactccagcacttgctgaagagctcctgaggcaaggatgccacatgccaacagttcttgggttcgtgtcctgtcactgagacttcacagaaggagccccagactcacggagtccgtgaagtaacccacctataaccctcacagcagcctcccattctccccaaactcttccctgcctagggtacaccagaaggaggagcataacccaagagagccaagaatccccccaaaaaaaatctcccccaaaggcaagcagtaggtgcaggtggcccacaccccctggccagtggccttagcagcactgctgggtgtctggtgtggagggcagtgtgggggctggacgggtgagcccgagtaggaaggcagcacccccagctccttcatgcctctgagatgccctgactcctgccatacccagccaccctccctgtcctccttccccctgcccccttttcctttcctctgtaaggccctggctccctcgcttaggccaagtcttctctcctctgctacctactttcctgggcagcactcagcccctcagtagtcagcattgtcaggagcagacccctcacctccctctcaaccttctggaagcaacaaggacagacagcaaagctggggaagggcagagcgcacagaaagcccacacataatcgcatatgtgcgccagtgtgattgtatgaagcatcatgtacataacagaaaatggcattctcatgttagccttttcaattgagcatttaccatgtgacaggtaagtaacattattagccacattttataaatggagaaatcagggttcagagaccctaagtgatatgtccaagaatgagatagagaaggacatgaacctaggcagtctgtctccaaactgcctaacccctccattaatatgccttccaacaatgtctgccgtggtgggggtgggggtgagggtggggaggagatggtcaggagtcaaggtgcgtttcaactttcccctccccactccgtgtgggaggctgctgctcgacacagcaccagagagagcccttcctcttctccctgacaggctgaggaacaaggggcagagtccttgctagggaggccaagccaccgggcaccgtctccccgaccagggccctcacccagggcgctggacctcatcctccctgtccagctccctgcccttccgtccacactcccaagggcaaagggaccccgccgggtcagggaaaggaaagaaccagccttgctcccctgtttccccacctgcagagtggctccatcgccccacctgctgagtcagcgctgttcagagtcccctggcactagcaaggtcacccatgccagggaaggcagccagtgggagagcagcagcgagtgtgggaaaggggcagaaaggcggatgtacaacccaggacctggagtttgaggttgtgcccagggctgagggcaggcccaggagggagcccagaaccctgaggccggccctggaactgggtcatctgggccggtgggtgggtctggtgagccactggatgtggaatgtggaagctgagtaggcatgtgaaactggaggggatggatctgacccctgcagtccccagagagccaagacgttccgggaaccacagcttctctccaaagaaaccaggacagctcaaccagtcctaacccctttcctttctttctcaggaatgaatacgcctgcaatccaaaggagaaaacaaagtagggagggaaggaaggagcctagagcccgctgcccaccctcccccgcccctaccctgtgcatctctggccctgggatttgccttctctgggtctctgcaggctccggacaagcagggatgtcagacctgacagagctgcccttctgatcactccctgccacttactgcctttggaaaaaaattactccactctctgggtaacagtttctgagtctataaaatagggataccacccaccttgcagtttattgcacaaataaatgcctaagccacggctatcactcaacaaatgttattcccactcctttgccttccctaccagcctcccaaagcaggaaagcccaggtgtcttgcaggaggagtaggcaaagaacctctcttcattcctggtgggcaggacagcagattctcctctaagcacatcagtggcattggtggagataacttgagaagtaatggcatctactggaaatcttgcaggaatagtggaatgttgatgccatgtgttggagcattcttgggaacatgctggaacgttcttgggggaacaccaggtgctcctgggtacacaatgtgatatcactagaagcccactgtgaggtatgggagcaacctggcactactgggagctcactgggaattactggagtgttcctgggattctgtgggaagtagctatgaatgccagtagcctgatagggattccatcaaagagatattggggcaatactgataatgctgagttgctggagacatattagaaagtgaccaggagctctctggagagcaaaagcacatggactttcctagggcactgtgagaactgcagagggcataatggagacactggggaccactagggactcctggtggggtcttcatgggtcccaccaagtgctgcactctgggctgcttactcttaatgaggggcacaggtgggtgggggtgcagccctcccgggggagccagaggcaggcccacactgccctggaagaaagagccactgcccttcaactgttcggcaaccacaaatgtgtgcttcccaggggtggcggcagcctcagaggaatgggaagctggtttagaaagtcgctctgaggagggaagcagttccaccttactgctaggagccctgcctggcgtcagtcccctcaaactcagaccccaggccttatctccacccccgaggtgaggggacagcctgaagtagtgcgattcaggggtctcagcaacaacacaccgccctccgagtagcctcagagcgtgggcaccggggaggggtctagaaaggatttacagccagtatctgcctgttaggactcagcagagaagagccttcttccccatggcacagaatagaggtagcaacaacccaagtccaatgccatagggtcaaatgtgggttcttccaacctgcccagagcctgtgggaatgaatgtagacacagctgaataactgagaagtgcatctcagaaagtccgcaagcaggcgcccgctaaccaaaatgttgaaaggtagaaggtcagggtcaagcttcaggatagggtcaagcctcctttcaaaagatctaggtatggtcagagtgagaaataaaacaggcaaggcagatgaagcgccaaattcagcatgttcaatatcaaatattcaatagcagatattcaattcccactccgtcccaggcaactaaacccagggtggtcattcccaggattcccaaagcaacaccatcatcatctctccttcttccctagatccctcttctcaaagaagagcattgctccatgccagaaacccaggtgtcacccaagacgccccctcggtcaccctcacagtcactgagatgctgcatcctgccttttctgactcatgacaaagctctctcctcttcccgtgactcttgagccacacctgatggctgcagttcatcgtctttcatacagacagcagcagctgcctctgggtggggaccctgcctccagccttgcccatctccacactgctgccaaaacggtctttctaaaacacagtgttagtcctgcctgccaccccaacaaagtcctttcttacctgctcagagcccacaaaatcgtattgaaattccagggaacaaaaggcctccaactctaccactccccagtgcaacctgtcctcctgccatcccaaatcccttgccagtctccacacttctattctcctccctcctccgggcctctgcgcgtgctgttcctttatctgcctcccaacagggctcgcgttccttgagaccatctgcagctttgcatccccagcacttgacgcgtagaggtgaagtcttgatggaataaatgaactgatgaagatgggaaagtgaaagattccatgagattgtagcattttcccagttataacaatgaggaaacagagaggtgatatagtttgtccaaggtaaacacagaatcagtaccataccccatcaccctttgctgcctcagcagagccccagagaaaccaaaacaaaagaaaaacagaataagaacccaggaggggctcagggtagcatagggcaggagtcaggagtgggcaaagagaggagatggagaagggagtttgttgaaggttggcagctatggctaaacagttcacagtgaagggagagccttcagagtccaggaagctttagccagaagtcagaggggtggacttgcagtcccaataggaaagaactttcctcctccaggaatcagaaagggactagagaaacccaggaaccagagtgaagacatgaggctggcagagagggggtgggaagaggggtactagtggctgtggtgacaaggctgtgtgcaggttattaaccctgggataactgtgtgagtcctgaaacagaaataaacctttctcacctccaaaccctcaccaggaaaaaaaaattaattttacaccacagtctcaggaagagaaatttagggacacacaggctgggcctttggcctgtgaaaacctcagcttcttagccccgttaggaaaatctgggctcttagagagaaggtaaagacttggataacgctattctctctatttctcacctccaaccctcttttctgagtcctctacatctttcaaaggccagattcccaccttggccctgtccagaagccttcccaactgccagaatttccagcatccactgttcctctgaagagcaaaagctcttcaccaggctcttcacctcccagcttattctgtggtcttctctggacaaggaagaccatctccctaaggtccatggtgactgggggtggagcagggagatggatttcccatcatcagccacctttccttgagcctagacccagtcccatcccctcctgctcagagttcagggctcggggactggcagggggaagctgtactgtggctggctggtatgttttgtcaagaacatatcagctgcttccctatttgggcaggaggaatccaggagggctgcatgccctggaaagcacctggtgctgctgggcccaaagaactcggcctcctctgtcccctgccttgcagcagccatgcccacccaagccaaagtgactcctaagcattccctgctgcggggcgcttggatgcaggttgaacatggctaagggcaagtcacttggctcaggacactgacttagtttctatgtgcccagcagagtcagggaaacttggacccaaggcaaccctgaggccccaggcagcatcatatacctgtctatcctccctgggacctttcagcattggggacgtgccctgtgtgtcgcttcactaaaccctgaggaatatgcctggctgaatcaggatgtgcccacagttcctcacccaggggcctcctcaccaacacccctgacccacacctgaggacttaaatgacagaggtagcagcgggcaaaaggccagtggaaggcggcagagaagctttgcacagcacctgctcctctatggtgtccagcctttccccaaccccaacccacccctcctcctgtgcagccagctccagccccagccacagagcaataaggaggaactggagaaaaaccgaggatccagcacagaccgcccaggccctggccaccaactcctccacccctggcagcacggagccccatcatcaggcgctaattaaatccccctaatgaggaaataaggatgcaggagccagctccgccatggcctccccggcccaccgctctcgcctctccatcggacttatcactcgtcacaggatgtttacaataatttttaatttgtgcaattattaatcacttttctatctgcctcatttgcataataattagtcatctcactgtttggcatgcctgtgaatgacagtgttttaaattgaattaagattttaatattctattttcctgctttcttccccctccacacgctaatcaaagtcagatttggcagcgagagagagggtggggaggaggttggcaggctctggacttggcccgctctgcgctcccgagaactgtgctaggaggagggcgtgcctgtagaaggtgacagcaatcccctctcacccaaatcctggctcttgaggggttaacccagccttggctaattgagtagaggtaatgagtgagaagtgggcaaaggcaactggggagggagggaatcacactggctcagtggcaccagagaccaagaaaagcactttcatttattttttttccaaataggctgctttttacaatgggaagttggaaagcatattacaggtctgtaattgatccccggttactagtctaggttaactttgatggctcagagtcccccaggtagaaaaacgcaggctggcgcagcctaaaacccatttctattcttcagatgtactgagaaaacaaatctctgcagttaagtttgattccccttccccctctccacacaccaacaaggccctctgcccaggctggacacctaacagacatgtaccagggggtgtcggatttccactgacaaggggccaggagcaaaggcagactgccctctgtcggggcagctgtgggtttatggatctcttgccctccagccctctcctgaccaccccaggaattcagctctagcctagaaaacgccctgctccatcccgtctcccgctgctgctgcctcgcgtgttgccatggcaatccctgtggctgcctgggatacccactgctgctccagaattctctgcttaagcagggcagctctcccgcagcctgtgtgagacaccgccctttgccatggtatgatcaccagcacgtagcctggaaagcctgatactggcctctcccttcaggtgagcagggagagaagatgggagagaggggctggtactgggcaagcaactacaggtcaggccacaacagcttgcggggccagactccagctcagcaggtcatgcttcccctggccaggggagcggagggaccccatcctggtacagcaaccccttcctcccacaaggatcaaggtctcccaactgcaagaggggtcaagggagggaaagtctcccacatggggaagaggaaatgaggtctttctgccagagttagaactgggtgagaggaaggagggctagaagattccaggagcccttccccttcacaggactccaaggctggtctgaattcccccctgcaagtcaggcagagaaactgtcaggcattccttgggtcccctctggccagggcatcctggggccgacccatgagtcctcctgccaatgtatccaggaaggccaataatccacccagaaaggcaccagcctcagagctggcagtgctaggaaactgcttgcccagtctttgcctgaaggggcaggaacaagaagtgtcagaattcaggaaaggcacagtccaatccaggatgatggggagtttctgagaaggtaggccctgggactttgggctgtgtctcccacccagactagaggaagcaggcggctttcttatcccattgtgcgccaggcccaggtgagcaaatctggtacaatcactactcaggggaccttagccctgtacgacaaccaacttcacccaccacagtcccagcatggcaaaaggagctttttagatagtgaggcacataacaagtgccgcagcagcctctgctggccgccttagccttccacacctgacgcacggccgaaaaggccggcggaccctcggaactatgcttaccatgagtccccgctggcccgggacaattctggtctacagctgttgtctctgcataattactaatagcaagcacacacacccttcactctcagaagcatcccagtttggacaataaattcagtggcctctaatcgcagccaagcgcaggatcccagcaagccaagcgagaaggtggagagactgaacatggagatgaaaagccttctctctggcctcaaccagggatagctgctccctttcagtcatcaccaaaggaggaaattcagagtccccagccctgggccaagacagatgcatctgggtagtcacacctgagggaagagggaaagcaggtatgcgggccggggcggaactaggcggaaggaggagaaagaaggaagaaagaagagcaggcgcagctggagggtaggaagcatgaaggaagcagaacgctatgactccatgtgtccagcaggtggctacactgagcggtctgtatcggtccatccccattgcagccgggcagccccatccagcttgccttgtaaggctcggggtgtggcttcctgtccttctgcaaagcccacctaagtcacaaagcccctctttcccctttaccctacttttcattcgcttttctccgaatgactccctagcctgaattacaaaatcacgaagacatttcacaaacccccatgccctcaccccgcacaaccccgagagacaagaaagagacgccagagcagtgggctccggggtagtgggattcctggatcgcttcctcctgggctggtgcctgcttgatgcagggctcctcagaaaccccctggtatctgcccacctgggttgggagtccctgagtacagaggtatagggaccactgtggttttttgtggtgtggaagtgaggtcatagaaatcagggaattcctatatgtctgtcattcagagaagttaatgcaaattagctgcaaagtaaaaaacaaatgtacactatttacatcagaagtcagcagttatggcatttgggggatcaggacagcagcaacagtccacactccacagggcctcatgaggtagtgagaagagggagccccaggctggtgcggatgggttttcctgcactgctgcccacccctgattccccagtcccaagtcactccaggtgaagcaatggccatatgtgtgggagggaggggaagtcacatcctgcactcaggcagcttgcagtctggttgatggcctttaggccccagtcccatgcttcctcccaccatggccccccagcctaatgccaagattctccccaggctggggccaaagtgcgattttatccccctttttcccaagtaggagaggattattgtgaaaaggaaaaataaggatcacagaatccttgggaagatttcaaagatgccctacctacatctgcatatcactaataaatagctgctgagttctggaagtttacacttgcccagttcttacctgcagtggaacctcaacctagcattcagtttaattcaacaaattaaatgtactgagtgtcttgtacaggccgggctttgtgccggatgctgaagactgtggtctctgccttgaataagccctaagtctggccgggggagaaaaacacgtcaaaaacactgtaatttgaagagactcacattagagtcaggtaggtacaagtacaataggagcaagtctgaagaggaagcatttgattctgccactctgcgggtagcacgggggccagggggaactccacaaaggaagtgacatttgagctggacccttaagggtgaataaggatttgctagggagaggaagaccagcgcagaagcaggagcttggaaaaaagcacagaggcctcaaagagtggtgcaaagtccaaaggctgtagggaagaggtcgatgaaccaagggcctcgaggcggaggagactggacacatcttgtagacagggcttcatcctgaatctgcttcccacacgacaaagcagtggaccttcctgttctcaggggatccttgtcaatactgggatcatcatgcttccccaccctgtttccaagaaagcagcaggctcctgtggctgggcctaggttggctggcagagcccctccaggaatatctgacaggagagttcatgtgctaattaagcatgcatctgatattgcagacacgacaatcaattagcatagctgattagacacctccacgaatgagctgtggtggctcctgaatgccctgaacccactctggcccactctcactcagagcaaccgcccccgactcactcattcatttgaagaaagagcagaggctttggtagagctgtggtctttagcctcagtttcttcacctacaacatggaaatattagcattaaccttgttgggttgttgtgagattaatatatggagagtacctaattttagtgcctaagttagtacttaataaatgatagctattagttctggggtgtaataccttggctttggagctagggatttgaaaatgaataagaaatagtttctggccataggaactcccaacgcacaaaatagtatgataaatgctgtcctcaaagtgccatgaaaactcagaaaatggctgaattggtaagcagatcctgtcctgggagcagtagcaagagttcaaattctcagttcctaagtataactgggcagacagggcccttctagcccctgccacaaagcccgggggtctcctagcacctcagatgagtgcttgaatagtagttttgtctttgccaacaacttttttttttttgagacagagtcttactctgtcaccctggctggagtgcagtggctcaatcacagctcactgcagcctcaacctcccagactcaagtgatccttccacctcagcctctcaagtagctggggctacaggtgggtgccaccatgcccagctaattttttaacttattgtagagacaaggtctcactatgttgcccaggctggtctcaaactcctgggctcaagcaacctacccacctcagcctcccaaagcactaggatcacatgcatgagccactgcccccagcccacactttctctttaattcatattaaaagacttttcaaattgactcagaagctaagtcctctccagcatgaggccatgttggccgggctcatctgagcctcaggagtataaccgggcccaagttgtaacccccattccggcctcctcctctcctgcaccaagaaaaaccagaacaaagcttagcatcctaccactttcatgctgagaaagcatagaagaacaagaaagtaggatttctagaggttaaaggtaactatactgagtccaaaacaccaactgcacaaataaagagatggatgcaacatggctccatctcctttctcacgatatgtgtaaaggagacacgggagcttctgacgatagtgcagtgggaatccgtggtgtgatgtggtcaccatgaaagctaatccaggccagccatggtagctcacacctgtaatcccagcactttgggaagccgaggcgggtggatcacctgaggtcaggagtttgaaaccagcctggccaacatggtgaaaccccatctctactaaaaaatataaaaattagccaggcgtggtggtaggtgcctgtaatcccagctacacagggggctgagccaagataatggcttgaacctgggaggcagaggttgcagtgagctgagattgtgccattgcactccagcctgggcaacaagagtgagactccatctcaaaaaaaaaaaaaaaaaaaaaaaaaaaaaaaaaaaaagaaagctaatccaatcttaaatacactgattaaaatagaatatctatctaggccttttttcagacatctctctctccttcacaaggaactgctctcctctctgctttcttctgtctattaaacgttccactccttaacccactaaaaaaattaattaattagttaattaaatagaatatctagctgagtgtggtggctcatgcctgtaatcccaacattttggcaggctgaggtgagagggagcccaggagttcgagaccagcctgggcaacatagcgtgacccccatctctacaaaatatttaaaatttagccaggcatggtggtgcacacctatagtctcagctgctcaggaggctgaggcaagaaggatctcttgagcccaggagtttgaggttacactatacatataaacacacacatacacacacgcataatgtctacactgagggaagtgatacccattgtactctgatcagcacactttgaacattatggcccagctcactccaactggaatgagttcagagaagtcagtgtgagactcgaaatcatgcattaaaaaggatggttgaagaaactgggggaaaaaaaaagtcagatgggcccagcagctttcttctaatggcaacattatggctcttctagggtcctgcatccttttcctcctgcctctccctctggtgtcagcctctggcacaggttgtcacgcttggttctgctgttgaactgagggtagaggagaaggatgaggccctctaggggaggtgtccatgaacaccattaaaccttctgtgtgtgctcatatgtctatcacagcactgttcacaatagcaaaaatatagaatcaacctcaatctaagtggccatcaatggatgattggataaagaaactgtagtatatatacacaatggaatactattcggccataaaaaaagaatgaaatcatggtcttttgcagcaacatggatggaactggaagccattatcttaagtgaaaccaaatcagacacagaaagacatatattgcatgtcctctcttgtaagtgggggctaaataatgcgtacaccctgggcacggtggctcatacctgtaatcccaacactttgggaggctgaggcaggtaggtcacctgaggtcaggagttcaagaccagccaggccaacaacgcaaaaccctgtctctaataaaagtattaaaaaaaaaaaaaattagccaggcatggtggtgtttgcttgtaatcccagctactcgggaggctgaggcaagagaatcgcttgaacccaggaggtggagggtgcagtgagctgagatcgcgccactgcactccagcctgggtgactaagtgggactctgtctcaaaaaataataataatgtgtacacatggacataagagcatggaatgatagacaatggagacttggaagggtgagagggtgggaggggggtgaatgatgagaaattacttcatgggccttatgtacattatgcaagtgatggatatcctaaaagccctgaattcaccactacacaagctgtgcatggaacaaaattgcacctctattccatacatttatacaaataagaatataataatttcaaaaataaaactccgtgtatgaagattaatttcctactaccttattatgtaaaagattgtctgcttcctttcctgtataagttttaatgcaagactctcctcctattagcttaatgctgtgggcccaggaagggaaacaggtagggcacagggagaaaaatttatcccaacacatctaaaattgtgtcagatagaaaggagttagtcttttttttatataagccccaagttggataattcagacaaatggtgaagccatggggaaagacaactggaaaaaagctagagttgctcaggaatggaatacatatgttcaaatgtgagtggaacggcacatcacataaatgtgttttgccaggggatcctggcactggggtgagtgtgaggattagctcttgtcgaaggctctttccaactttgattctaggattaatcgaattaacactgcatttccatggtactagaggggaacagcagttgagctagtgaactgatggaaatacttacacactaattggtatggggaaggtggaataactagaagccctttaaggtatcttccaactctgagattcttattttgtgattccagattctgaaagggagccactgtagagctactggcagatctacacagctgacaagatgcagctcacccctctgtctcaggtctcaggacaacacctggtgtgtgcacgtgggtggggggtgggtgtgggaagcagagatgagggcaggaaaagatagacatctgcagggccagagcttgggcacacacacacacacacacacacacacacacacacacacacacacggtggagatccagagttggacccttcccttagctgctggccacagtcatctattgttggggacacagctgcctctacctcctctcccaaaaccagtgcaggcttgaggcaacctaagacaccaaacctcagaaccaaagtccatttgccaaagcataggtgccccctcaaaagctgggggacagaagatggtgctgagcacagaagctactgccagcatgaccagaaggtatcacttaaagtggcatccttcagccatctctgtgtgctctgagactgtggataagagtcctctagtcacccactacctggcatccccctctcactcccctccctgtccccagagctcctgctctctgcttccctccctttaatgcagggtggataggcagagaacacaggacgcttcctgccctgggccctgctcagacctcagtggttcaaacacagccctccccacagagttctcactacctgctccccattatgaccacagcctctctgcatcacccacaggtaacatggcccttggcagactgctttctccatcccacaggactcccacacacctcaccccactctgcctcctccactttatactggccaaaaacgtgactttcttaacaagccaaaaagctgctcatcctctcccaatatcccacccttgaactttgaaggctgagtcaagagttttacttctgtcaaaacacagccagtgcagagggccaaccttcttccctcccactgaggaactggaggggcttcctcaaggtctcatggacacagccttgcagctttggaagcagagagagaacaaaacccctgactcaattctcttcctcttttgctcctagagactgttctttttcctgccccttaggagacacagacaccgtagcaaccgcactaagcccagcggtaatgtgttttcctatatggagttccacccacctatgcaggagtccaccactgactatcttcatcataagccaccctgcccccaaccagcactatgctcaaaggcaaaagaaacaaccaaacaaacatgaaatgctggtgaaaactgcttttgaaattccacatgcccttaaatgttaaatgcagagaactcctcacccctccccacccccaccactagttcttatgtccccagcttcaaataaattcaaactgggtcctgtctggacaccaccaccagcacccacctctcccctgacaaggggcaatgggtaatagaaggctaccatgagacaggcaagaatcactggaacaagccaatcacttctcccccgcctctagacaccccctctccaggggacagaagatccccacctgtttgactactcttcttcaaatagtacatccctcaatcccacccagcaagagacactggctctccaaacacagccagagaactgtgaccctggtgttcaggtaaagccaggaataagacaagagaaggatcaacagagactgggacatgtgccactgaggcagcagacatgctctttaagtatctattttaagaaactatttattaagcacctactacatgccagacactatgctagataactttatttcagatcctctcaataaccagaaagggaggtattaccctgattttacaaataaggaaattgtgtggccaggtgcagtggctcacgcctgtaatcccagcactttgggaggccaaggtgggtggatcacctgaggtcaggagttcgagaccagcctggccaacatggtgaaaccccgtctctattaaaaatacaaaaattagccgggcatggtggcaggagcctgtaatcccagctactcaggaggctgaggcaggagaatcacttgaacccgggaggcggaggttgcagtgagctgagattgcgccactgcactccagcctgagggacaagagcgagactctgtatcaaaaaaaaaaacaaaaaataaataaataaggaaactgtggctcagagaagttaagtaacttgataggaggtaacatggactactttttgatgacctctcactctaggagactgaccaccactgacttcccctactaagcccaattaatgaagggaaggtcagaaggaccccccctcgccccccctcaaccccccacaaactgaacttcccactggggggagcagcagaagggagctgcttttcagcagttggaagcccaggaggaaatagccccaggagatgttaaataccacctgaagccccttggcatggctccatcctgcagcattatttttaccccgggcagcaaacatatccagcatgtgcagaaggaaactgcccccggctggcagcccactacttaatctgcatgaagagctgagctggccaaagcaggagacggccatcctgggtggcaacagcactgtcaaatttgatggggacacagtgaccagggtaaagtgcccaagctctctgtcaacaagtaatcagcatgaaggtcctataacttcaggatgtatgggggaaaacaaggaagagtttatcctgctgggatatcccaaccccccttttcttgggagacccagaaatgtggctctccctaatctacaaccattcacagactgatctctccctgacaacagaggtaatgtaagtacgcactgaacatacacatttgacacacagtaagtacttaatgaaagagagcaattaaaacaataatttttttcccagacaggcattcctctcttcccagaggtcttgtctaccacctcccaagcccctggcaaaaagagacaaggggccaggcgcagtggctcacgcctataatcccaacactttgggaggcaaggtgggcggatcacctgagatcaggagtttgagaccagcctgaccaacatggtgaaacccggtctctactgaaaatacaaaaatcagctgggtgtggtggcgcacatctgtaatcccagctactggggaggctgaggcacaagaattgcctgaacccaggaggcagaggttacagtgagctgagatcgcgccactgtactccagcctgggtgacagaatgaaactgtctcaaaacacacacacacacacacacacacacacacacacacgagtcaagggcacgtgcccctctaacacacttggttaggatcttcaaagccgagttccaaactgaaactaccagcaagcagttcttccaggactggggaactcagcttcaagtacactaggacctccttgcagaggctatgagaacccctggtaagaactgctctggacaggaaacagtcccttggactgccccctcacctcttaccttgctactggagtgaagataggtgggggtgacaactgcagggagaggaatctgttgtttaaattctgactctttcccaactcagagcgattttgagcaagttaacctctctgcacaattgcttcctctcctactaaaaggaaaataaagaaaacaggccctgtttactaagcactagagattgcatttttacgtgtgacaggataaagtcacacactttgtaattccttagctgacagagggcgctggatgtgatatgcggagggaaagactgactcctttttcagcagactgctctctgtcccctcccaagggggtgggttcacaggtactgcctgagtatcaacctaccaccaagatcgcccacgtacccttgttttctgaaagggtgaagctgtataaggccaagatcaacaccatcaagtttgaatcattcaggagagataaaggagagactgagtcattccagtctattactacgtctattactactattatattctatctgagccagagtgtctgctcagtgattcttcttttttgttgtttttacattttttaaattttatttatttcattgagatggggtctcattgtccaggctggtcctgaactcctgtgcttaagtgatcctcccacttgacctcttgagtagctggaattacaggaatgcactaccattcccggcctgttttaatatttttaaattcagatataattatcataccataaagttcacccttttaaaatgtacaattcagaggtttttcacattgctcatggcttcttaagtctaaacttgaaagtggaggaggcgcaagaaaggagatttgattaaaaggaaaaaaaaaatcttccacgtagagaaaggtttccaaagcccaagtaagggagattctggtcaaaacctaaatactaggtctctctcttgaaaatcttttccatattggaaacaggattatgttctagatctaaggcctactattattaagtgtgtatagacccagggctccgctttcgccagtctagaaaaggcatatcacactgccctctagtagacagcctaggaaatgacagtcagctagggactggacaggcttgcgatctctgccctacaagatgtgctgtgttctcacacttacaggcagagaaattggagggggtggagtttttaaatgttcactaatgcctactaaacatagagctcacctgaaacagaatctaactgctttccctacaccttaatctctgcttaaaaataaataatacattcctgcgcatgcctgtaatctcagctactcggaagactgaggcagaattgcttgaacccaggaggtggaggtcgcagtgagccgagatcgtgccactgcactccagcctaagcgacagagcgagactcggtctcaaaaaaataaaaaatgaataaataaataaataatacattcctttgttaagggaaaaaaagtgatttcagatttctaaagcctctgagcctcttaagagtgaggtgttcctaagaaacagcgtgagggtcccacaaaaatgaagttaaaacccgaacccatacagaaacaaaacctagctgtgcagaaggggtgtgacaatgagctaggagttgaatgcctcctctgccaccttgggaaggcgagacagtaggatcacagcccacaagtttcaagcatgccatagcactccagcctgggcaacacagcaagatctgagctgtaaaaataaataaagtacttccatctcataaatgctgattctcgacacaattccagtttacattttatctccctacctaagcccttctctgacaatcactggccagagttagggaagagacatccctaacttggtagtgaccccaactgatactcccttcgggattttcaggtctcaaaactatttaaaaatctatgtatgtctcaaatggctgggggatggacagcctttctttacaagtctgagaagtatataatgtggcaaagataatatgttatgtgtccaacaacatccatttatcccttcttcctgatgcatattatatgcctcgggctcctttgcattaagagggagccttgtgactaggttcttaccaacagaatatgagtagaagtgtgtgccgcttctagagctagccggtaacatctgccaagcaatccttcacgttctgctcaactcactaaaatggtaatgcccaacacaaccttggaagccatagtgaagctggcatcagcctgatccctaaacaacttcatagagtatctcactcctactttctcaacctgaaacgacctgcatgttacacgagtgagcaggggggaaacacatgtctatttggagtctgctttagcagtttagtctaccctaactaatatgggtactaaatgtcaattccatgaaaccagaccttgcttctggagctgcacttagggcttcaggtgcacagaactgagttatcacaggcctgagttcatgatacacgatcactttcatccatgcaaagccctctttgcttccctttccccgcttcattctccattctagtctcattctgttccctcccacaaacctattctactgattaaggtgtatatcctccttataaaataatatcacttcatgtgtttatatagctgatttttgctttaaatttcactgttccttattttttcacttgaagtctaccatttcacgaaattcctaacagcttgcatttgacttaaaaaaaaaactccattatatgcatataccacattttacttatcaatttccttagtgatggacatctaagttttttccaaattcttgccacccaaactatacatagaaaaacatccttgtatctactcctcaaggatttatgcaaatttctccgaaggatatagccaggagtggaactactttgaagtatgtacataaagtattagttatctgttgctgtataacaattgttatggttataactgtaactgctgttgcttacctaccctaaatgcaaacttccttccctaaatgcttgagcagcttaaaacaataacaacccatagaatgagaaaagtatttgcaaatcatgtatctagtaaaggacttataaccaagatatatataaagaaccctttacgtaagagagtgcctgtgtatgtgtatatataaccaataacccaaatgaaaaatgggcaaaggatttgaataaagatttctccaaaagatatataaagatgctcaacatcactagccaccaggaaaatgcaaatcaaaaccataatgatataccacctcccacccatcaggatggctataatcaaaaagacaaataataagtgttggcaagcatgtggagaaattggaacgcgcatacatttctttggaataagtttggcagttcctcaaaaagttaaacatggagttacatatgacccagcaatttcactcctaggaatatatccacccctaggaatataaaaaagaaaatatacatccatacaaaaacttatacatgaattgttcacagcagcattattcataatacccaaacagtggaaacaactcgaatgcccatcaaatgatgcataaataaaatgtggtatatccgcacaagggaatattattcagccttaaaaaggaatgtagggctgatacatattacaacatggatgaaccttgaaaacattatgctaagcacaaaaagccagacacaaaaggccaaatattatatgacagtctcactcatatcttattaatatatgaaagtccagaacgggcaaactatacaggcagaaagtagattagtgtttgcctaaggctggagaagttaggggaaagtggggagtgactgctaatgggtacaaggtttcttgtacccacaagatgataaaaatgttttaaaattaaatgtggtgatggttgcataactctgtgatatattacaagccactgaatcatacaccttaagtgggtgaattgtgtagtatgtaaattatatctcaataaagcagtttttaaaaaatactaaacatggccaggcgcagtggctcatgcctgtaatcccagcactttgggaggccgaggtgggcagatcacgaggtcaggagttcaagaccagcctggccaacatagtgaaaccccacctctactaaaaatacaaaaattagctgggcatgggcacctgtagtcccagctactcgggtggctgaggcaggagaattgcttgaacccgggaggcagaggttgtggtgagccaagatcacaccactgcactccagcctgggaaacagagtaagactccacctcaaataaataaataaatactaaacatttattatctcagagtttctttggttcaagaatctggagctggatgttctgggtcaggatctctcacgaggtcgatcagggctgcaagcctgagggagggcttgagtagagctggcggatgcacttccaaggtgattcactcctacagaaggcaatttggtgctggctgttggtgagaggcctcagagcttctctacctgggcctctccagagggctgcttgagtgtcctcatgatatggaagctggcatcctccagagcaaggatccaagatagcacaaggcagatattttaataccttttatgacctaccttcgtaagtcacacatttctagtacatcctattggttacacaggtcaaccttatttattgtgggaggggactatacaagggtttatataccagagggcagagatcattaggggccatcgtggaagctggctgccctacttgatgataatgatgacaatgataataataacagctaataattctgtgacactactgtgtgccaggcattgttctaagcttacaataaacctatgaggtaggtactattatgtctatttcacagacgaaaaaactaaggcatagagaagttaactggcttaccaaaggttacacagctagcaaacgacatagctgggattcaaattcaggcagtatagctccagagccacactattaaaaactgcaatatcgctccctaggtattacttgatttcagtaagtttcattcatttgttctccaaaatgaatacaccagctgaaatattccatgtagccgggcacagtggttcatgcctgtaatcccagcactttgggaggacaaggcgggcggatcacctgaggtcaggagtacgagatcagcctggccaacatggtgaaaccccatctctactaaaaaaacaaaaattgtgtagcgcatgcctacagtcctggctactcaggaggctgaggtgggaggattgcttgaacctgggaggcagaggcaccactgcactccagcctggatgacagagtaagactctgtctttttaaaaaaaaaaaaaaaaagaaagaaaggaaaagagaaaagaaaagaagagaaaatattccatgagttctgattccccatcagatcagtctcttgcttatttttgccaaactaagatgtaaggtagaaactcagtgttttaattagcgtatctgtaattactagtgaggtaatatacttatgagccactctggttttctctttagattttacctattcatatttttgcatatttttatttcatctgtctttttcttcatgatttgcagaagctctttctatattctatcccttgtatatgcaatccttgtcagttttagacactgcaaatattttctcctaatccgtatccatctttagctttgactatgggatgctttgctaaatagaaacctttaattacaaagtaatcaaagctatcaaatcttatgcattgtgctttgggatcttatttaagaaatttatctttaccccaaggcacaaaaacatttgccatttgttcctactagctgtatatcacgttatctttcatttaggtctttaatcactttgggatttttgttttatatggtatgagggttcaactttatttttgtccatataataagccaattttctgagcactattatccatctcttccctactaacttgtgacactatctttatcatacaccatgtctccaaatatctgtgtgtctattcctgagtctagtttagtactaattcctgttttctcagaggaaggatctatcactaagaaagtttttactcacactgctttctagattagtgaaaaattcaaccaccaccccccaaatccccacaggttcaatattagcctgtattcttcccaaaacagaatacccagttaagaagataattttaaaaaaataaatacatgtttatttaaaaaagaaaaagaaaaaccctaccaagaacaaaccctggtcaatgagaaatcaatgcttcctctgaaagccagcaacagccggtgctgtcacacccaagaagtacaggtacctcagtccaaacatcaggtctcgaatattcttctgtggtcaaaactggcattcaacaagttgctggtctgtgtgggctccaattattagcacagacaactgttaccactggatatctcgctgcctatgcccactaccacagcccagccacccccacagcctcaggaaagttacatatcctcaacactccatttgtaggcaagttcctccactgccttcttgctggcaagcctggcaaagcgcttctgttcaaatccattggatctgcaatcaaaagagacatactattcagctagaaccctgaaaggggcatttgtttcaaaagaaagggaagagttcacaatataatgaaaaggggggaaagtaaggagtcatatgaaaatattttaggcatggccgggcacggcggctcacgcctgtaatcccagcactttgggaggccaaggcgggtagatcacgaggtcaggcattcaagaccagcctgcctaatatggtgaaaccctgtctctactaacaatacaaaaattagccaggtgcagtggcaggtgcctgtaatccagctattcgggaggctgacgcaggagaatcgcttgaacctggacagcagaggttgcagtgagcggagatcgtgccactgcactccagcctgggtgacagagactctgtctcaaaaaaaaaaaaaaaaaaaagaaagaaagaaacaaaaaagaaaagaaaatatttaaggcatatgcaatagaatcaaagggacaaaatatatcattcatccttttcttagtccttgttcacacccttcccccactctgacagctatttcaaacgtttgccactctaaaagcctggttctctctcagctgatgtccacatcttatattttatccattcattacacaaacatttattgaattttcattatatactaggtaccatggtagacactacatgaaaatgagtatgacacagcacctgtcctgatgaactcccagactagtggaagagagagacatttaaacaaataaattaaaagaacagcataaactctggtagaaatacgcatggggtgtcatggaaacagaatgggtatcttaatcagcttgggggaggtatgataaaaaggtgacatgagggttgggcaagaatgatcagtaaaggctctgtgttaactacagcactggggatggaagggccagaaagggtctggaggtcatttcagaacagaatgagcaacaagaacaaaggcacggaaataagaagtggcctggtatgtgcagcaaaccaaaggcaaactggtatggctggaacctgaagtatgacaaagggaacagccatgagtcaaagttggaaaggcgcagaggccaatgcataatgagctgcgtaggccatggtaaaaagcttagatttcatccagaaacgatgggtttaaagcaagaacttaaactgcatttcaaagagatcactctggaggggatctggggcaggaaaatcactgcaatggtccaggcaacagatgatgaaggcaatgataaagagggacggaagagagaagacacaggaggcaaaattagtaagactaattagcagcactaattgattaggtacacaaggacaaagaaggaggaggcaagttagagagcacaagagtaggagcaggcttacagtagaagctgatgagttcagctttgaatacaatgcatttgaaatctctcaagtctaaatcaatagagaaatccaacaaacagctaaatacaccagaccaagatgcaaatactgatttggaaatcatgtacatataggtcatagttgaaaacatgactaggtaagaatcagccagagggagcacatagagtgagaacagctaaaaattatggatggagccctgggaaagacttaagaggtgcacagaggaagaggagtttgcaaaggtggccaagaatgatcagagaaaagaaccaggagtagggtgtcatggaaaacaatacaggggtgaatttcaaggaggtagtgagtggacctcaaatccctttaattaccatgcattctcttggtcttcttatctaaacttcttaaaaagcctgtattcactatttgtttcctcacttttcattcactccttaatacattagaacctggccattgtttcactacacaacggaactagccctttcaggtcatcactgacattccttgttgccaaatccaatgactcctccttcctcttccccaaatcagcaaacaggtcccaccagctcacccctgaccacatccccacttcctattctcttactaaccatccttactaccactgcctgcaagtcgtagttcagacactcattactttcagcctgagctactgcaaaagccttgtatctgttctacttccaatcttgtacctttcaaatccttcatattactgctataatggatttgtctatctaaaatgcagagctgtttttaatccttccgtgtctcccctttacctctagggtgaagaccaagctcctcagataggcttccagggccttctgtgatcacggtctgccaacctctctcatccatctcacgctttatgctatccaacaacagcaaattacttagggacccccaccacctggtaacaccatggtgtctcatagccttatgactctgcacatataggaccctcttcctttaatatccttcctttccttcttatcttggctggttaccaacatcccttaaaactcagctcccacatttcatccgttaggaagcacttcctgatcactcacatcctcctaaggctcaacttactcttcctttgtgctcccaaaacatcttgaaaatcttctatagtaacactaaccaaacagcgttgaaactgtctgtcttctattctagattgaaagtgagctcctgggctcaggggctatctctctttaatcatggaatccctagtacctactacctagctgcttacacttataacatgtatgctaagactttcccttaagggatgagtggagtgagtaacagagggctttaagaagggaagcttggccggacatggtggctcacgcctgtaatcccagcactttgggaggccgaggcaggtgaatcacctgagatgagaagttcgagaccagcctggccaacatggtgaaaccctgtctctactaaaaatacaaaaattagctgggcgtggtgctcacgcctgtaatcccagctactcgggaggctgaggcaagagaattgcttgaacctaggaggcggaggttccagtgagccaagatcgtgccattttgcactccagcctgagcaacaagagcgaaattccgtctcaaaaaaaaaagaagggaagcttattataaatggcatcctctccaaccttagaagcatggatggtattccaaagcaccaaggaaaccactgttttttaccttggaaataaggtcttaagagagttacactaatatgataatacaaaggacatatgaataacaaacaccaaatcctaagcagaatcagaaaacaaattgcaggagaactcacagtggaaagagctttggaccagagaatcaggaacgcagagttctaattccagctttctcagggaaattgcatgactctaggcaaactgcttatttattgggcctcagtttctcttttttttgagacggagtcttgctctgttgcccaggctggagtgcagtggcacgatctcggctcactgcaagctccgcttcccgggttcacaccattctcctgcctcagccttccgagcagctgggactacaggcgcccgccaccacgcccagctaattttttgtattttttttagtagagacgaggtttcaccatgttagccaggatggtctcaatctcctgacctcgtgatctgcccgcctcggcctcccaaagtgctgagattataggcatgagccaccgcacccggccccgtttctctttcaattaagagaggctgggtaattatcttatgggtttttccaacagatactatgtatctgttccggaaatattcccttgcagcaggccgaaaagagacaaaactagaaaagatgatgaaagatgaataacaaaaagaaagcaagggtgacaaagggaaataagagaagaaatctaggataaaatcagaacaagaagtggaaaaaagcaactgagaaaaatgaagacaaattaaatactagtaaaaaaaactaggtcagggagaattctaagttttgggtccaaaaattaaaaaacaaaaaacaaaaactcggtagcagggaacatctgtagggttgtgctataaaaagatctacttctggctgtatgtatggcaaatgagtgttctgaaaaatcctccttctaccaaaaagcctacatacagtgaactgcaaacggaactagtaagctagcctgtaaccacagctaccctaaagatatctgccaagatgaggaactacagtcaacttatagatatctgccaatatcagaaagaagagccttaaatttttttattctggagttggggtctcactatgttgcctagcctggacttaaactcctgggttcaagcgatcttcctgcctcagcctcccaaatagctggtactacagacacacgccaccacacctggctgttggattttgacggcaccccgagggacagaagacaacgccttaggcccatataaggtggggagacagattctagacattgcagagtaacccgaacagactaacctatcctcagttagcaactataaaacctagacaaaacaaaaaaaataggtatttgaaggtgtggaagagtgaccaaaagtaagtatgaactggatgaagtctatatgtgaaaagagatttgctggagggcaacttcccaaacagcatggctcatgaaggcagaaagccacaggcttactggcttgaggaattagtgcaaagtgggcagaacagctaggaaattaggggggaaatcttggaagagaaggaactacaaaagagatgaacctcaaaatctacatacaaaccctagtcaaatccttggctaactgttaaatgacacatgtgcagagaaaataccatcaggccaattaaaaaaatggcagctagaaactaaaagaactgagcaaagattgtagctgcggtccactgcaaaggagacagtttggagttcagctatgttaactacctgctagaataaaaactaacacacttaagaggaatacagtgtaacagaactcaaagtctctacagtgtatcattcatgatgcgtagtaacaattttaaaaagtgaccagacaggtaaataaacaggaaaatgtaatacacactgaagaaaaagctgtcaatagaaaccaatcctgtggtgaatccaatgttgcaattagcagacaggacttcaaagcactaattacatatcataaatattttcaagaagaggaaaatgtctcataatgaacagatgggaaatctcagcagagaaatgtaagctattaaatggaaattttagagttgaaaaacaaaataaaccagctaaaacaaaaaatccacaattgatagtaactgatagaaaaatacaaacacaaaaaacccagaatacaggcgatctaagatctaaacaccttgacctcactgacttttataaaacactaccttatatagctacagaatatacgttctcttcaagtgcaaaggaaacattcagaagatagactatgcactgggccataaaacacaccttaacaaatttcatttttattattgttttttgatacatggtctcactctgtcatccaggctggagtgcagtggtgcaatcacagcacattgcagcctcgacctccctgggctcagtgatcctcccacctcagcctccacagtagctgggactataggcgtgtgccaccatgcccgactaatttttgtatttttttgtagagacagggttttgccatgttgcccaggctggtctcaaactcctaggctcaagcaatccgtctgccttgggctcccaaaatgttgggattacaggcatgagccactgtgcctggccaacaaatttcaaaagatcaaaatattacagtatattatctgaccaaaatggaattaaattataagtaaatagcagtaagatatctagaaaagtccaaatatttggaattaatgcactcctaaataacccatggagcaaagaataaaccaaaaggataattagaaaatattttgaacaaaatccaacatacattcctgaaaacaaaactctcagcaaaacaggaatagaaggcaactttaactccataaaggatatctacaaaaaacctacacagctacaacacatttaataaatgtgttgtaaaaactaaatgttttcttcctgagattaggaacaaagcaaagatgtctgctctcactacttctattcaacatctgcactgaagtgctagctaatgcaacagggcaaggaaaagaaacaaaaagcatctagattgtaaagtaagaaattaaactgtatgcaaagatggaagaccctctaggtacaaaatctgatggaatctataaaaagctattgtacaaagtgagctttacctgaaggaaaacaactgacaatacagtgtaacagaactcaaagtctctacagtatatcattcatgatgtccagtaacaatttaaaaaagtgaccagacaggtaaataaacaggaaaatgtaatacacactgaagaaaaagctgccaatatagaaaccaatcctgtggtgaatccaatgttgcaattaacagacaggaaggacttcaaagcaccaattacatatcacaaatattttcaagaagaggaaaatatctcataatgaacagatgggaaatctcagcagagaaattaagctattaaatggaaatagctcaagcaatggaaatgccagtgataacatttaaactttcaagtgtaaattagaattctgaaaaactgtgaactctttaacttcccattatttaaagagttttgtgataagaccggaagtgatgttaacaaaagtgattttctgatattgtatagtggaaatatgtcaacatttggaaggtctgaacaactcagcaaaccaatattttacaaatgaccaatgcatgatgttataaaatcatgcatgggtaaaagatccactcaaagtattaaaaaaattaatataacagtaaggaaagttctttgatctggtttcaggttccacatagctcacctttaagaaaccagcacttgttgagtttttgtgtaacattaagaaatataatatgccttctctttctaactacctatgtgtgaggctaaattttctttctatacttcaactgaacaaatcacaacagacaaatacagagtcaagttacctattattaagtcagacattaatgagatttgcaaaaatgtaaatcaatgccatccttctgttttttcacttggaaaatgtaattatttttcatttaaatatacagtaattatgttaacataattagtttatttttttttgaatgaataaatactttttaaatgtctgagttttaatttataatgtggtaaatatcaatatatataatccacatcaacaaaagctttttgaggtcatcagtaatttttaagagcgtaggccaggcacggtggctcaagcgtgtaatcccagcactttgggaaatcgaggcagacaatcatatgagcccaagaattcaagaccagcctggccaatgtggcaaaacctcgtctctactaaaaatgcaaaaattagctggatatggtgacacatgcctgtaatcccagctactcaggccactgaagcatgagaattgcttgaacccgggaagtggagattgcaccactgcactccagcctgagcaacagagcaagactctgcctcaaaaaaaaataagagtggttgggcatggtggctcacctgtaatcctgtaatcctgtaagcctgtaataccagcactttgggaggctgaagtgggcgggtcacctgaggtcaggagtttgagaccagcctggcaacatggtgaaactccgtctctattaaagatacaaaaaattagctgggtgtggcagcgggcgccggtaatcccagctactcgggaggctagggcaggagaatcgcttgaacccaggaggcagaggttgcagtgagccgagactgcgccactgcactccagcctgggcgacagggcgaggctccatctcaaaaaaaaaaagactgtaaaagggtcctgagattaaaaagtttaagaattattgtgctagatactaaaacaatgtcctttagtaggcaagaggagatgggatctaatatgtgagtatacaaactgactttggatggaagcaaatattcatccatcataacaggaagttagagtacgtgggtacagatgttggtaggtagacagatgaggtggggtagaggactggaagacattaaaagtgactgcctcctaaaaccataaagtgaataaagattcagaggctacattttaaagatatatcaggtagaaggctccagactacaactcatcactcaacccctctaaaccttacaaaatatcattaaaagtaaccaatgtccaaaacaaagggtgtcttatctgaaccacctgaggtgtttgtccagagctttaaaaagtattatgaaaaggaaacagaaggaggagtgttccaagcatgagaaataggatttgtggacctcagaaaaagaagcaagcaaagtgcatatttttcaccttgtgattaaagcagagaatgaaataaagtgtggagcaacttacgagtggttagggaaggttacagtcaggtagaaaatgtaagaaatacccaggcttacctgtccactccgtcccagcgatatccaggccagatattaaatctgttgggaggaggtgctggaccactgtagcgaggtctcactaatgagaggagtaagaaaaaagtattcagttaatgacatagtttaattcagagctggatggcaatgtggaattttcctttttttttagtagagtctcactctgttgcccaggctggagtacagtggcacgatctcagctcactgcaacctctgcctcctgggttcaagcaattctcgtgccttagcctcccaactagccgggattacaggcgtgcaccaccatgaccggctattttttttttttttttgtatttttagtagagatggggtttcaccatgttggccaggctggtctcgaactctaaggtgatccacccacctcggcctcccgaagtgctaggattacaaacatgagccactgcgcctggcctggaaaaatttttatatagaaagaccaattgagttgaatctaaactcacaaatacaatgaatttaaattatttgggaaatccttctttgcatatagctatgtatcagcatcctaatgattctctcttcacaagtcacctccagctgatgattcccagaagtcccaccttttttattcttgttctccttggccttattcttcttgatgaagttggccatagggtccccctctctttcctgttctcttagcatcctatccagatcttcgtcatcaatatagcgggccagaggcttttgcatctctttcattgcatcctccacattttgttgctgttgccggctctgggcaagcctgggcaaaaaggaaccaagagtgtttgctatcctgtatgacatttccacttctacacgagatggaccatactgctaagtttggacaatctcctctttctagtaccctagggcaaatactgagcagggtaaaattcccagaatacccactagaagcgtggaatatatcaatatcctaggaagaagattcagcacaccaaatttcccattactgataacagctctgaaggcataataagaaagtgagtgatcagaagagcagagaaatgacttgttccagtcactgccatcttgtttaccctttcagtggttcccttacccttttccccactgggcatacagctcatctctctctgagtccttttctgctttcctcctttgctctaaacgttcgagtttcaaattcctcttacgaccagacttatctcgaaatacggtttcagcatattgaaattcagctgcaaaggaaaattatactcaaatatcaggatcaaaatcagaaataacattctaagagatcaaatcaaccgcttgggattctaatgctagataagaacttctgcagccagaccaaagtagttcctaccaacatcttggtgcatattggcactgggcccaagaaatggcattttccttttttttttttttttttttttgagatggagtctcactctgttgcccaggttggagtgcagtggcgcgatcttggctcactgcaacctccacctcccaggttcaagcgattctcctgtctcagcctcctgagtagctgggattacaggcatgcaacaccatgcctggctagtttttttttgtatttttggtagagacagggtttcatcatgttagccaggctggtcttgaactacagacctcagctgatccacccgcctcggcctaccaaagtgctgggattacaagcatgagccaccgcgcctgggcgaaatggcatttttcaagaaggaaagaagcactgggattcactgagaaattacaacaatgcataaaaccagagctgaaatttgatagcaattaaaagttcaaaatatcaggtacaataagctaaattaaaaaaaaaaaacagtatgagcctaaattggtctctgcactttcatatttttaccttcaaatgccatggtttcttgatcctgttccttgagctcctgctgttctcgctgtatgtcagttaacaccaacccagttttagccccagaatacatgtgtgcagcctatgcaacggaaaagggagcatccaacattaatgagatgatgtgacagtaggttccatgggtacacagttagttgcatttgtgtctaatgaccagcaataattaaacctaaaactctagctttatattctcaataattaccataggattcaaaaactataaaagaaaaccatcatcaaaaccatcaagtttaagaataagcagaaacactaacaatatattaaatggagggctacgcatttgtatttctgacttttcagtatataaactgcacacatgaagactatctcaggtcatctgatcagaaaccagtataaagcactaagccttccattagagacccatactgataaaatattccatttacagtacaaactcaagcaaacctaagatccttaaattgtggatatatttcatggtaataacagaagatctaacaaatgaaaactttttgctaatttccacttagcatcaagatagcaaatcagcccacgaatgaagcacacagtatatcttgatatccttcagcaacgaaattggaataatattaagttgtccatgaactaaatggatatataaaatgccaagaggtccagctgaaacagagacctcttttttccctaaaaaagaagaatctcacttcctgggtaaagaacaggctggtctaccctgccaggaccagtcttctcagagtcttctacagacaagatttacctgataagtctgcactggggagaaaaatgcacatcacaggctctatcattctgtttcttaaccacttacaaataagattcctttactactaccaatgttctttacaatataattactcaaggttcatatggattttggggttttttggctaattcatcaagccttatcatgaatttaaaacaaaccattgacttctcagacaacatgatttctaaaagtggtttcatattttaagtgcctctccttaagctctggatacagagacctatagtccaatttatactagtaaatcactaacactagatgcttactttgtcccagacactgtgctaagagttttacttacactggcttaattatcataacaaccttacacagtaggtactactattatccacaatttacagataaagaaactgaggtttagagatattaagcatcttgcccaaatctcacagacagtaagtggcagaaggagaatttctgtatgtgatccgtttgacacaatgcttgtgctccaaacttcactctgcaaattacagtcctcggtttattcctaagaaaataggaagtttttctagacctgttaaaatgagattgtagaattaagaggctataaacgcagaagctacttgggaaatctggtatctgtaagtccatctgggatgggttatagccagtttgccttcagaaggaaagacctccaaaggtccttttaactaagatttactacacttctcagagctacatccttcttcttggcttgattctctgggacatatataaagctgagagagaagagtcacacgaaaagaaggacatggctcctgaaaatcctgaccttctttccaggaggctgactccttcgaggcggggacaggtcagaatcagaagatttggtcctctgtctcctccttggtggagagaggtcagaatcagagctccggtgtctaggtctattccgtggaggtgacagatctgaatcagaatcctggtgccctggactttgtttatgccgtggagaagaaaggtctgaatcagttgctttctggcagtcacctggataggagcaaagaatctgtgtgactctgatgtcccctaggtgaagaacttacatgaaatctcctatggctgggagaagaacctagaaattaaagaattccttacattattattatttttttttttttgagacagtctcaggctggagtgcagtggcatgatctcagctcactgcaacctccgcctcctgggttcaagcaattattgtgcctcagcctcccaagtagctggaattacaggtgtgtgccaccacgcccagctaatttttgtgtttttagtagagatggggtttcgctatgttggccaggctggtcttgaactcctgacctgaggtgatctgcccacctcggcctccaaagtgctgggattataggcttgagccaccatgcctggccaaagagttctttaatccccttggaagaatctaaaaagataacttaccaagctaatgtacatatttatttagttttcctatgaagaattatcattaacctaaacataagtatggatggcacaggagaagagcaaagtcagaaacaacttttaagaccaacaggtagaatatggcattctattcccaagtgaccactgactgtaactggtgtgtaaaatctccacacactcctctatgtcagtaaccccacccatggaaagacaaaataacttgtagtcagctctccatagtgtggcaaaagtcagaaatacctggaatatagtctgatatccttggactaaaggataacaaagtactttaattttaaaattaaaatagttcctaggaacaaaagagggagtaaaaaatttcactgcacaggcctaagttctagcgactgtataagcatcacaagtcacctcccaaagggcattctgcaatatgtatcgacagtctttaaaacgcccacatcttctgacccagtacatcaacttctcagctttctaggaaacttatatagaagtagttgaatttcgaggaaatctatctagaagtagataaggaaataatccaaaatggggacaacagtttatgtacaaggatgttcattatagaattacagaagaaaaaacttagaaataaccaaaaacattcattattaggaaaatggttaaatttgtagttaaacactattaaaaattatactaacataaagatgttttatggcctgaggaagactacgttaagaaaggacagcaggcaagattgcacatgcaatacaaatgttctacacagccagagctcaactatataaaaaatgcaaaccaaaaaagactaagatgaccctggccacaacactaacaataattacctctgaatgacagaattttgtgtcacattttatctttatatacttctgtacattccaaagcttctgcaacaaataaattgtacttttatatggggtggagcgagcacataaaaagacatatgaaaaccttcctccctgccaccataattgttcaactctcccaaacccagcctctcacttttcaaaactttcccaaagaaattccattcttatacctaataaatcaactaaacggccaaaagaaagctcccagggatacatacatccctctcatggacagtcatatgctcacctttggaatcaagctgcttcttgtctccaaaatgggattttgcttgcttttttcgtggaggagagatgtcagggtcatactcatatttgctgttctttgggaatgacaaatgggaggctcctgactccttccaatgtggagaagtcttgctagaggctctttctggggctttaccacttttggttctgggcagggaataagtgacattaggagccaaatcaggggagtcatgacgggcccttctgagttgctgtgtgtctgaagagccaagagtcctcctagatgtgtcaggggagttgttatggacccttctgggggaagagatatctgaggaaccatgacgggctcgcctaggaggagagggatctggtgaatcatgacggactctcctaggagatgcacctgaagaattatgctgaggcctccttgggggagaaggatctggagaatcatgacgggccctccttgggggtgaagtgtctgaggagtcatgacggatcctcctgggaggagatgtgtctgagtcatgacgagcccctctgaggggagaaggatctggggtgtcatgacgggccctcctaggagatggatccggggtgtcatgacggtccttcctaggagatggatctggggtaccatgacggaccctcctaggagatgaatccggggtatcgtgacgaaaatgtctgtttgagggtaggtcttcgttgtggcctaaacacaaataacaaagagtcagattcccacaaatgctctgtccctctgtccacccccacacccagtttcaaaagatgctccagtagcacatacctcagaactgctcagaaagcccaaaaggcctgcacagttttcttgcttaggggcagcaaaccaccactcatgaatatcttaagaataacccctccgcctaccaagtcataaatttgcaaagcattttcagcacatttttcatattataccctttaaggtaagcagggcaggtacccttgtattacagcatgaaaacagaggccacagcctctgttttcagctgaggagctgagtgatttcttacctaaggtcacagctcctaaaatgaagacacaggctagaatccaagtcttctaactcccagtccaatgttctttctaaaacctcatttgtgcagagttcccagctagtggctcctactgatattttgcctagatactttatagtttgtactcactcttctttcaataggtaaattgactaaaacggtgaatatcaaaataaaatgctgttaactatttaatccatttcactgtgctctttcttagagaggggaaaaatcaccacaaaaaagaaaggagcaagtaattaccaatcacctactgtgtgccagtgtttcatagagattacctgattcaattctcacaacaagcctaggacataaatactgtcatttcatttatagatgaggaagttgatactcagaaagattaacttgccaaagtcatattgctaataagtggtagaggaatatttaaatccagctctatttgactccagagtccatgtgcaatctttaaaatatgtaaagctttaaagttaaaatacatagtttgagaccttccatattcaaaggcaccacagaatgaaatatctatagcaactggaacagtttcaaaatccagttcttcctctacctctatttcttgtcattgagctccacagcccaaatacaaataaaagctgggtaggaactgatgaatacttgttaaatggatgaattaaaccaagtcaactcctttactttggggaacagccctatctgattggaatccactccacagagaaaagtatgatgtctgtggggggcctaacagtaaatctgaaggaagcaagggtcagagattggtaagcgtacttccaataacaaattgggatgggggagtgaaagcaaggcagaagaaaaggagtgagtgagtgtgagtgtgactgtgtgtgtgtgtgactgaccttctaaacattcagatacacaagaaaaggcaccgtgtgtatgtgtgtgtctgtgtgtcttcctagacaaacagacatggagaccaaaagattctctttggaaaagaattctgattaggctacaaaaatcaaatacctactagcaattaaacaattctacaaatatttattaaaggtagctccttgtgctagataggggaatatcatggcaaataagactagtctatgctcaaacagatgtgacaaacaaatgctttttatccaattctcaaggactcaaatttttttaaagagagttaaattaagattattagcttaggaagagtccaaagtgggcaagtggagggtaatgcactataaaacaccaatacttaaggaaagaagagagaaatttactaacacaaacagaacaaaatacactggtccttgaccccccagaaatgagttgcttcattgtggaagaggatagtggtagctaaagtccccaaattctgctcctgtttcttgtaaactcctcccaaagtcttgcctatacaccaagtgctctcctattctgagtcaaagaggaatgggtgctcaaaggcctccaaattagtcaccaacctcagtaatcctaatgccaaaatataagagaaagaggaatatctggtctataagttcctatgtcttactacctctgaagaagtccaacttcctttttcctgctttatttttcaggatcaatgacatgctaaaacaaactatgcattcctctaaagaaaagtatagaaaaggaaaaaagatctcccctactaatggaaatttagatttatctattgttggaactcacctcccagaagcttccatttggcactggaacgaaaggcctccatctgctttacctcttctggccgctcatccacaaactctgccacctgtgagagtaaagatttcctatcttaggaaatccacaggatccagccaagaagcactgtctcaagaacctgaagttacaaccattccgattcctaacacaagggcgtacatatatccaaaatggtcatgaagaagtaagtaggggtcttcagttatgtttgctccataaacatctgattgtcactgtattggtttaattgtagatccttctctaattaatcaattaccctgcaaaggttaatttttttcattacaaacctttttattaacctgctaggtacacaacagccacttgtaaactaacaactaaattccttttacacttttacttctacattaacagtggaaacataggtggctccccccatcatgcctagcactaatcaaggactttgggtttctatgaatcctttcttgttgtaggtagtcacagtgataggttttcttgaatacaaccaaaaagagccactgagatgtacacagaatcattaatctttaagagctaaaaccacatttcatatcttctaaacttctgaacaaatcagaatcttctctatagtattcctaataagtggtcactcgcccaatcccttcctgacaaggaactcattatcttacaacacagtccactgcatttttcaaaaatgttagaaagttcttagttttactagtaccgtatctgccttcctataacttctttgaattcattctagttctgacctgtgatgtaagtccacatgacaaactttcaagattgctggcataataaatcctagttacagagtagcaactatgtgcaaggtactgtgttttgtggtttactcatataatctaactcgattctcacaataatcctgtaaagaaaggctccacactactgaatagcaaactgattcggagaagttcagtaactttctcaatgtcacaagctaacaagtggcagaactggaatttaaatccaggtcataatagccctctacttctcccaaaatcctaccatcattcttcatataacccagttttgagatctctcactgagcgttaaaagcacaggtttcgggcaagatgaattaagatctaaaccccagctcggccacttagcatttgtgtaacctttggtaaattattctaagcctcaatttcctcatttgtaaaagtgggattcaaaggattgctataaggattgaatgagataattcacgtaagcttagccatgcttggtacatgataaatgcccaataaatgacacctattaattattcctgtgctgccactgctatcgtaatcatcataatcgttttaccattattactggtggtggtggtgatcttgcagttacaaaaatgaattcagtaatcaagatctgttttaaccaatgcagagagcagtggcactaaagcctcctttgtttaggtttttgggccatcataaaagcaagacaatattataaaagaaaatggccaggtgcggtggctcattcctgtaatcctagcactttgggaggctgaggcgggtggattgcttgagcccaggagttcatgaccagcctaggcaacacggtgaaaccccgtctctaccaaaaacacaaaaattagctgggcatggtggcaggcgcctgtaatcccagctatttgggaggctgaggcaggaggttcacttgaacctgggaggcagaggctgcagtgagccaagattgagccactgcactccagcgttggtgacagtgtgagaatatgtctcaaaaaaaaaaaataataaaaacaattatgaactaagtgaaaaggcaaatgataaaatacacccacaacataagcctaatgaccatataaaaaatgattcatttcactagtgttcaaagaaactgggccaggcacggtggctcacgtctgtaatcccagcactttgggaggccgaggcaggcagatcatgaagttaggagatcaagatcatcctggctaacacagtgaaacttcatctctactaaaaatacaaaaaattagccaggcatggtggcaggtgcctgtagtcccagctactcgggaggctgaggcaggagaatggcgtgaacccgggaggcggagcttgcagtgatccgagatcacgccactgcactccagcctgggcaacagagtgagactccaccaaaaaaaaaaaaaaaaaaaaagaaactggataccattactcacttgctaaatcagcataggtttgctattggttttgttttgttaataatccttcaatattggtggggcatgtggctaacacctgtaatcccaacactttaggaggcctaggcaggaggatcacttgagcccaggaggtcaagaccagactgggcaacacagagacctcatctctacaaaaaatacccaaaattagccaggcatggaggtgcgcacctgtggtaccagctacgtgcaggactaaggtaggaggattgcttgcacctggaaggtagaggctacaatggggcatgatcacaccactgtatttcagcctgggcaacagagcaagaccctgtctcaaaaataataataataataataataataataataatagtgctctaatattgacgacgtaggcaaactggcattctcatcacctctagtgggagtgtaaattggtagcaccttttggaaagcaacatgggaatataactaaagcgaaccataccctttgatccactcatttcattttatgggaataaagaaataaactgatttctacaaatgatttatgtacaacgatgtatgatattttataagtggaaacaatccatgtatccagtaacagaacagataaaatatatatattgaactactacataaccgttaaaaatcatacactcaaagaatattttaaggtcttaccagagtatccacaacatattatttagcagaggagtagactccaaaaccctatgtacagtatgatcccaattatgttcaaaaaaataaaatacaagcgtgtataatctctaaagagaaaaacctgaagagatatgcatccaagtattagcagttatctttggatggtaacatgcaagtgtttattcttttaaaaactttaaactttttttaattcccaaatattctgtaataaatatgcattgcttttataaaattaaaaaaaaacaacaaacattgttaatatttacttcttctgaccaaaactaaattggctccctaagatcactatttcccttctaattactagcaagccctcttttaaataatctattttagaattttgctgggaattggccaggtgcagtggctcacacatgtaatcccagcccttcaggaggccgaggtgggcggatcacgaggtcaggagatcaagaccaacctggctaacatgatgaaaccctgtctctactaaaaatacaaaaaaaaacacaaaaaattagccgggcgtgttggtgggcccctgtagtcccagctactcaggaggctgaggcaggagaatggtgtgaacccaggaggcagagcttgcagtgagccgagatcataccactacactcaagcctgggcaacacggtgagactccgtctcaaaaaaaaaaaaaaaaaaagaattttgctgggaattaatattaaatactcactggaatccatctttaccaactttagtggaattcagcctatctacagctctcctttccactttgtttctcagaaattctcagcaatggtttcatgaaccactgggaggtcatttgcctatgattttgtccacctggctcttacttacccttcaaaactcagtatttacatctttcaggatatctcccaacagaatacaaagtatgctacctccccgggctctaatggtacttggtacgtatgtgaaacatccccaacatttaccatactgttgaaatttatctgaaattcagtttttcattctagggtataatctctaaaatacagctatgttctattaatctacatatctccagtacttaggcaagaatatacaatttgaaagcttagttaaagcactgaaaaaaggagcaaataaaaagttccctataactgaacctcagcattgtttttaaggaagattccaacaaaatgaaccacagctaagtctcatcattactctaacactgatgtcgagaagtcctctctctgtgatccatctcatttctaggctgatggaccctccataaagagacaagttggtgtataggcatcagcaaagaaaactattttaaacagctctttggaaactgtcacctcttttctgttctcaactaacccccctacaaatctaccctaagctggaaaaataaatttgagaagcttggcctggcacaatggctcacgcctgtaatcccagcactttgggaggccaaggtgggtggatcacctgaggtcatgagttcaagaccagcctggccaacatggtgaaaccccatttctacaaaaattaaaaaaaaaaaattagccaggcatgatggcgggtgcctgtaatcccagctactcaggaggctgaggcaggagaatcatctgaacccgggaggcggaggttgcagtgagccaagatcatgccattgcactccagcttgggtgacagagcgagactccatctcaaaaaaaaaaaaaaaaaggaaattgagaagcttgcttcatttcaaaatcctgacagccccaaagatacataccacaggcaaatctccatcatcttcctcttcctccttttctagtttggttgtggagatagctgtccagctcacatcatcatccacaatccgcattctaaatgagaataagaagatcaaaaagagtcattctaggataccagcataaaaacatttatctattggttttaaaataaagttcaaaattctacaggatcctgcatggtccagtctttgtctacaaggtcaacttcatctcctactgctacttccttggttgaacacctccctggtcatcctttggtgcttagaaaggagccaagttcctatcacatcagttttcacatatgcagttccttccctctgcctgatctactcttttcaatctttttctttttttttttttttgagacggagtctcgctctgttgcccaggctggagtgcagtggcacgatctcagctcactgcaagctctgcctcccgggttcacaccattctcctgcctcagcctcctgagtagctgggactacaggcgaccactgccacgcctggctaattttttgtatttttagtagagacggggtttcaccgtgttagtcaggatggtctcgatctcctgacctcgtgatccgcccgccttggcctcccaaagtgctgggattataggcgtgagccaccgcgcccggccctagtctttttcttttttgagacagggtctcacactgctgcccaggctggagtgcagggacaccatcatggctccctgcagccttgacttcccggggttaagttattctccctactcagtctcccaagtagctgggactacaggcatgtgccactgtgcctgactacttttttgtattttttgtagaaacagggtttcaccatgttgcccagactggtctcaaactcctagatgcaagcaatccacccgccttggcctcccaaagtgctaggaaactctttctcattccaggaaactcttcctcattcttcaggtcctaacacaaatttaacttcctttggcaaacttttcttgactgcttcacccaattccctcaccatcccacactcactcaagactaagaacccttgttaaaaactcttggaatactttcattgcatttatcataaagaaaatatatcgattagttgtgtaattagttgcttaaagcctgtattcccattaatctataagctccacaagaacagggactatgttttttttgttcacagaggcatcctcaacaccctacagtaactggaatacgaaatattcaataaatgtttgttacgtggataaactatatagttgagcccaaataataacaatgactgccatgatgtgaagttattcaaaaagccagggtcacttaatgcaatccctctaatcacaaccaccacttaataaaaccattattattattattctcattttaaagataaggaaactgcagctcagtgagatgaaacaccttgcccaagggtacacagcctataaagtggcacagctaggattcgaactctgaccagtgctgctccaacactcaagctactttcatcacatggcactgcctccaaaggatccacacaagtcagcgaggcagaaagacgaagacaataataaggcaagcaccaaaccagaaaagaacttggactagttctttagaacaatgtgacttcactgggtatctcagtgccttagggttactgtaacaaagtaccacaaattgcgtggcataaaacaacagaaactctctcgcagttctggaagctagcaatctgaaatccaggtgtctgcaaggccatcctccctggaaagtctctagcagagaatctttccttgcctctcccagcttctggtagccccaagcataccttggcttttggcaacataaatccaatccaatctcagccttcatctagacatggtcgtttttcctttgttgctgtgtctgtatccatacttccctctttttaaaaggcaaacagtcatcttggatttggcacccaccttaatcaagtatgacctcatcttaactgattacatctccaaagaccctatttctaaatgtcacattctgtggttctgggtggaaaacgatttggtagggcccactacactgggccacaaagttgtcccatatgaaaataatacccacttcatggtagtgtggtgaggcttaaataaacttatatatgtttaaatttcttataatggtgcctggcaagaaaagtataactatataaatgttagcttctcacgttaggactattactaagagtaacaggaggtgatcaaaggtctctgattcagaaccaagtccttgggatctgggaatccccacaggcaggtaccgggccctaaagatccaagcacagaggctttgaatccgctccattattctcgaggcacaatattcattctctatgggagaggacggaagtctaccaaggcgggaaaagagtaatcaaagttacaccccggctttaacgcactgacgctactgctcagaggctcgagatgtaagcggggcggcagaggcaaggcggggggcctcaagcgatgtgagtggggccctgagcatgagcaggggtcggcggagaagcctagagacccgccaagagggaaggaactgccgggcggccgagggcggagttgggaaggggtggctagacgtcgcaggccccgccccggccggtaccaactcaccccttgccgccggccccgccaggcttcggccgctttttgcgacgcttgcgaccggactcagatccccggtcgacgccggcatctgccccggacaagtaacgcttcagatactcggccttggaaagcggcggagctgccgccatggcagcggcgggggcagagagacgggtcggcgctggggacaaaatgcctcaacgcgtaacggacgccagccacccgacagggcggggccacggccggaagtggcggagagtgctaagaatcgcgcggctggcaggtgcggccaccgggacgcgctcgcaggctagccagggacgtgcgcaccttcggggcgctccacagccctgggacgacgccaccaggtttcttctcttcattcactcacccacccacccacccatccatccaaccgcagcaagcgctgttctatgaggccacaacctgacccaaaggaccccgcccccatcggccgcttaaactccagagcacgagcaagaaagtggagggccacgggctgcagcgtagccgagtttgaatactggttccatagctggctagctgtacgacctcgggcaagttatcacaaaacagggagaatcccggcacctaactcggaacggtcacaggctgagatgatattactgtgtgaagtgcgcagagcggtgttgggcacatggtcatcggaactatgttcgttatttttataagtatctttaagtggggggaatctgctccactaggcttccaggtacctaccgtccaagaaaggaagccaggaagtgcaaaccaacataattactatgaaaaacgtagtttctaagacctgtgtaactcttctagtgttctattacaagtagcccccagttatctcttgaaggaaactgtaaaacaatcttgccaatgagaaggacggacctggatcattttttagcatagtaaaagagagaaaccagagagaatgaattctaacactcaagttttggggggaaagaaaagactttattctttgcagggggtttagagctttacctgaattatctcatttaaccctcacaattctcaaatcgtttcattatcatattttacagataagaactgaagcgtggcaagattaaggaagttgctcaacttcacatagtcagaacatgactctagggagtagaggctagcgaagtggggtgcaagaggtcatccaaatttcttgaaataccagatctttttacctcatcatatatgttagattgtcagttttatcgttttcttcccagctttattatttgacaaaaaattatatatattcaaggtgtacaatgtgatgactggatataattatacattgtgtaatgattaccaaaatcaaattaagtaaaacatccttcactaatttatgtagtagttcggggggggggcacttaagcaaatttgtcttagcaaacttcaagtaaacaatacagaattattagctatagtcaacatgttgtacattagattcccagaacttgtcttaaaactgaaaacttgtaccatttgagagagaagttttagtgttactgaaatcacagacttctgacagaatttgcaggatgctatacacaactacacaaaagtgcaaacaatagtttcttggaccaagagtcaaaaaggtcacttttttaatatattagtcaagcagacagggctatactttataaataaatacacattatctggggataagtgtttaaaaaattctttacttatataatacaaaacaggcttggggatcagtcttgaagcatgaatttttacccagtgggccatgttgagggggttgcagcacaggcccagaaaggaaagcaggctggggctctgagggcttgtgagacgaggacgctgggctgagaagatagggcttcactaggcggagggccccagggtaccccatacacaagcctgccttggcttctcgtccaatttggtgcatctcacactacacagccctgccccaccctggtgtcagcaggcattcagaaagcctcacacttctgctccagtgaacactgccaggatagccctctgaacttccacccacccatcttctgcccatttgttttctttgtcttcaattccactgctacccatcctaccccagtcccttagcctgacaaggcccaagtgtctccaccctgtgctgcagggcagttaagcaggatcagatgccgtgccaatggcctgctctgagctttggcctctctctgcagttgtatctaatagaacaaatacagtaattgtggagctgagcttaaaatattcagacctcaggtttcagagtctgactggcatgggtttgacacctgcctcttagaagctctacttctggccaggcacggtggctcacgcctgtaatccctgcactttgggaggccaaggcaggtggatcacgaggtcaggggtttgagaccagcctgaccaacatggtgaaaccccatctctactaaaaatacaaaaattagctgggtgcagtggtgggcgtctgtaatcccagctactcaggaggctgaggcaggagaattgcttgaacccaggaggcaaggctgcagtgagccaagatcgcaccactgcactccatcctgggtgacagagcaagactgtctccaaaaaaaaaaaaaaaaaaaaaattagccaggcatggtggcgtgcacctgtagtcccagctactcagaaggctgaggcaagagaatcgcttgaacctgggaggcagaggttgtggtgagccaagatcacgccactgcactccagtctgggcaacagagtgagactccgtctcaaaaaaaaaaaaaaaaaaaaaaaaaaaaaaaaagctctgcttccttctggaagtaacctctctgaggctgttttgtcacctgtaaaatggggataattttgtttatcctaattatccccattttacagactaggaaaacaagcattggaagtgccaatactaaactgaggtgaacgcacaaaataagcagctttttctctccacagttggaaacactgccatttgccttaaaaagaagtgtgtaaaaaacattttttaataggaataaagccaagtagtcttagccaccactgccctaaatgtaagcagagacaccattttctgcagtgtgcatcaggcacataccacaggtgtacaaagaaggaaatatactgatgttagaatgaaagtgttgccatcattaaagttttcagttggccaagtcaactgcccttcatacttgctcccaacactcacctcccctcctccactcatcatgacacagatgtacattcagtacctacctgtatgttcgtccacacgtctaatgaccgaacatggctgcatttcacatacttgacccatgaaagtaggaggcgtgccctcatgcatgaaccactttccttttttaacacaatcacaaaccttttccacttaaatgttactcatggctgtgaaactgaatccacatgttcctggcactttgactcacctaccctggccttaaagcgagaccctttccctatctttttacctatagatgttatccctagtgtcctaatagggtttaatctatgatggaggattttaacagattttattaaccatgtgtcatatgctgggtgctgtggagcaagactcagttaactatatgtaagctcccatcctgacacactttatgaaatgagaaaggagctgaaagataattcaagagaagggtatgaaactgaagaatgccttgtcatcaaagggcaggaagtaccttagctgggttatcccagtctggcacctggtcctcagtcttcaagttcagaaactcaggtcatcatttcctaggaactgggtggattctgggagattgcctcacaccaaccaaactcacaagagattcagtaataagccagagtgccattttttttccttcacaatggaaaatgaacctgatactgcagtttatcttaacagagcacacctacactatggggaagtctacttaagagaccaaatgatagatcagagggttgtctggtaaacttagattcccaagtcagctggaaacatatctagagataatctcttagggtagaatagttgcctgtgagaagtttgcccaaagtactgaagctttatagtttgaatgagtcatttgctaacctgagtctccaaacaccttactctcgccctcacttacagaaattagagatacaggtatggaagttagtcccacatgatagtaagatgccaaagaatctgatatggagagatgtctgaaagcagaactctcagaaacaaatttagtaagaggggaggaggcaaagtgtccaaataagaaatattcaaagtgaagggaaaaccaagggtacagtatctcgagagccaaaagaagggttaagaagagatggtccactatcaaatgtgacagaaatagataacactttccaagtggaaaatcacttgtgacctttgagagtagtttaacagagcaacgagagtagatgtctgattgctaaatcatctctaactcattcttcagagttaagtttgcaacacagccggacgcggtagctcacgcctgtaatcctagcactttgggaggccaaggctggcggattgcctgagctcaggagttcgagaccagcctgggcaacacggtgaaaccccgtctctactaaaatacaaaagaaattagctgggtgtggcggcgtgcgcctgtagtccccgctactcgggaggctgaggcagaattgcttaaacccgggaggcaaaggttgcaataagccaagatcacaccactgcactccagcctgggcaacagcgcgagactctgtctctaccaaaaaaaaaaaaaaaaaagtttgcaacacaaagcaataaggtttgtgataacatcttaatcaatgaactggtctttattgaacaaataccctgcagtctgcaccacaggagtcaccttttgtttatgagaggcaggagactacagtgcaaagaacactggctgggaagtccagggcccaagcagcagagtgttcactggtccttaactttcagaagaactgcagagagcctcctttctctctggatgaatgtgtttcaacatttctaactgagagtagggctaactgatcaggtacccccactggctctaacctcacagctctagcatttgcagttccctctgccaggaaatctcttcccccagatacccacacagctcactccctgacctcctcctcagctttgcccaaatgtcaaattatcaccttcttgttcagaagatcttccctactccccatttccttgcacaacccagccccattccctgctttacattcctccatgacactaatcaccatccgatgtactgttttcctcatctgtttattgtcatttttccccactagacttcaagttccatgaaagagatttattttgtcctctgttctgtggtgtgcttggcataaagtagataagcaagcatctgctgaaggaatgaattaaatgccagctgcaatccccaaattacagtagatacacgggaaaattttctttaggaggctgaattctaacagcatgatatcaaacaaggatagggtcaatacagaggccagtgctgtttgaaagtcatcatttcaatggtaactccttcacttgtgctggactcggtctcccctcaggagactcctttcctgttcaaagtcagtattttatatactcaaaaccaacaacaaactccaggtgtaactttattccaccttctccaacttcagagttccaaccttagaggatagagcattatgtggaaggagggtgaggacttgatatgaaaaaagtgatgacatacccctggttcatttctgggtttcctcctaggccaattcaaaacttccaaaataaggtcaagtaacacaataggctcacacttgcatcacaagctgtttagaaagtgtgcacagatctctgactcagaccagatgtcctccccaccatgggcaagggctggtgggaaagacactcccagccttcgccttcatccaatactaataaataacctacagaaagagcagcgctggaggctggcccttgagccacccactgctaccgttgcggagccaggcctgcctcatagccctctgtcttcatgtcattgagccctagctcctcattttggtcaaaggtgcgcttgtaacgctccaccttcatctcaggatcatcttcaggcgcatacacattctgcaaggtcaaggagagacaatcagtgccgctgtgccactccccctctctgcaggcagcttccaattcccaccttcccaagaacagaatgagttttgggtttttttctttttattggcctccaatttcccatggctagactgaactagtgggtagcaacagagcccacatgggccaggggtagaagaccccagccccagaatcagggaacaatccacctattttgttatatctgcaccttcttatgaaaagtatgacaaatggtcttaatcttggaaagaacttagaagagttttgcctgacccatggtaagtatccaataaatggtaaaggtacatcaatcaccagactctctcctcagtcaacttaaagcctatcagtttcctatcttggcctccggacaaggtaccatttctcctcaatccataatcagatttgcaaaatgaaaactccagaactgggacaagagcttgactacagaaaaaaaaggggcctcagagtatcctttttttttccttctttacatacacttaaaaaaaaaatcccctcccacacccccctcttttctcccttatgtatcttctaacttctgcctccttggtaaaaagcagtccatttagaatcaagtctttcagtttctagggaaatgatacatattcaaggaagatcagaaaatgtatctctatgaaacatcagggaaggtctactatacctgcaagtaactgtttcctgctggatcatccataataaagtgggccttcatgttaccttcgatgatctaaaggagagagagaacacagcaagtaaattttacataacccctggtaaaaagaggctatgtcgggggaggggggagggatagcattaggagatatacctaatgtaaatgactagttaatgggtacagcacaccaacatggcacatgtatacatatgtaacaaacctgcacgttgtgcacatgtaccctagaacttaagtataataaatatatatataaataaaaaaagaaatgaaataaatgaaagtaaagaaaaatttttaaaaaaaagaggctatgcctgccagacaagaaccaacccaatttatattacagaatccccaaaagttttaagaattggtgaaattaggtagctctgaaagtagaggggaaaggttctaaaataaggactgttagaaaagccaacatcagcaagctgtggactagggggtgctggcccagttgaaggtagagggaaaggaatcaagaacaagtaggttaaatgaatgtaagcttatgggaaacagaatacatacacaccccagcccccttcccacagctctcagaacactgccagccaagtctttaccctcaggccaggaaatggagcagccacagtcatttaacctccttgttcttgagtcctttccctctaccttcaactgggccagcaccccctggtccacagcttgctgatgttggcttttctaacagtccttattttagatcctttcccctctactttcagagctacctaatttcaccaattcttaaaactttggaggattctgtaatataaattgggttggttcttgtctggcaggcatagcctctttgtctgactagcccaagaggaaagacctaacaattctggcattggaggccacctcagcaaaacagctaagttaaattcccctgtaataagccccatgtcaacaaggctcaccccctactcaggtctttagcccgctacttgtaagaagacaatcaatgattatcagacatctgagcaaagcccttaacactgaaagatgggaaatcaaatggggaaaaaaaggatgcaaggagaataaaatgtcaaaaaagatccaacatcagtatcaataagtgctatataaactgcatgctgaaaaaatttaaaaaataataatcctcaagaagaaaaaatactacatccttaagacaggatgctattttttaaaaagctccttggaaaataaaagttttagtggaaatgaaaacctcaattgaagggttggaaaataaagttgagggaatctcccaaagaagaacaaaaaaaccaagaaaccaaaaataggaccaaaaaaagagtaaattatagaagaccagacaagtaagtctaatatctaaaacccaggagttttcagaaagaacagaaaaaaaaaatcagaaaaaagataatcttcaatagaataattcatgaaagcttcctagaactgaaccacatgagttttccagactgaaaaaatacatctaccaagtgcttagcccagtggatgaaaactgacccacaccaaggcacaccctgaaatttcacatcaaaggaaacgaagagatcacaagactaggtcacatataaaagaccaggaatcaaatggcttcagacttctcaatagccaaagtggaagactatagtacaatgtctttaccaaactggaagaccatagtgcagtcttcgaaattctgataaaaaattatttctatcctagaatcgtattcccagccaataatcactctagtgtgataacagaataaagacatgttcagatgtggaaggtcccagaaattttatttcccatgcactttttcccaggaagctactggagaagatgctctaacaaaataagggagaaaaacaagaaagaagacatggaatatagaaaaccagaagagggccaggtgcggtggctcacgcctgtaatcccagcactttgggaggcccaggcaggcagatcacgaggtcaggagttcgagaccagtctggccaacatagtgaaaccctgtctctactaaaaatacaaaaaattagccaggcgtggtggtgtgcgcctgtaatcccagctactcgggaggctgaggcagcagaatcgcatgaacccgggaggcagaggttgcagtgagccgagatcacgccactgcactccagcctgggcaacagaacgagactctgtctccaaaaaaaaaaaaaagaaaagaaaaccagaagaagaatccccaacatgatggttagatgttcaaaaagtggcaagacatgagcatgcagcctcctgttcactggagccccaggattctaagtactgactggccagtgacctcttacctggtccatcttctggctaaactcctgtagtctctccgtctgtccaggattggaactgtcgcccagtgtgaaaggatttttggtcacctgcaataaatgataatccaaactatgtgaatactggctttatatttgttaggcctgaccataaactaggcagggggtgacagtgggtgccctgtcagggaaacttggtttccatttagcccacaccacctttctgaccaaggcagtcactcctaggagtctatgggataatgtgccaagataacaaaactggcaatgtaaaacaaaatcgaaacatgttcttagaatatgatctctgatactaatttggagaagaaatgcaaagaaaaagtacaatttacaaatacaaaatgcccaacagagaatcaagtgaaataattcatcaaggagataaatatttgggctaagtcaacccatacatgtatgttttttatgttgggaagttttaggtgctagaaggaccctcatcccctaactttacagtaaaataaatgacttgtccaagaccacaaaataactataaagtcccaaagttaggcctggaatttccattcaacatttcccataaacttgtcttcaccatccaaagtaatatttaagtctcttaaaccagctttaaggcaaagaaacccacagttaccagcaccgaaaattaggatgtctgaagtcttccagtccctcttcacacagccaaattgctcaaaggtggtttacacactactcaagtgactcaccagttcccggatgtctttcagcagcccttccagtgtggtgaacttgcccccgaggactgccattcccagttcaaattctagctctgggatttccacactgcaagtctcagactgtgaaatgagaggtcagtttaagctttaagtcagaagcaaagaaagccaaccagaggcctcctgcccaattaataccagcagtgatagactgcggacaagggcagctgtctcagttttctctgactcccttgttaaagcttgagactcactcctgtccatctgaaccacgggaatagatccaacttaataaagggaaactcagtcatagcttcgagctgtcaggtatcctgtcactaggggacagacagagaagaggacccagatagacactggaggccaaaaagctaccaggtcatcagaaagagctaacagggtcaccttctaaacctgcaattccaatcttagattaactccctctgctcaggggtcctcaaagccagggaagtaggagatacctcatgtccctgaacattatttctaaaagacaacttcccctagatagagacagtttatctaacttatgaggacaacagtgactttcccaagcagactgttaccttgaggaggtctctggtcatatctgaggcatctgtgatgtggagggtgatcctggtgcccaagggttctactgctcctccagatttcacctgcatcgataacagtcaggagcaacagagagaagacctgagcctcacttggtacccaggagacctggagtgtaggcttggacatccaatcagttagggtcattaatagctaccaaagaaagagccttctaaacagcagtcgcccaaaccaaaaacaccaagagctggccaggaacagtgcccaaccctggtaacgtgccaaaacttatcccaaattgccaataaactctgaatttcccttaaaaaaaaaaaaaaaaaaaaagacttttggggttgaaagagacttttaagcatttattgcagtcctttcatccactgcatccaatgtgtgggtctcctttataatattctggttaaagaatttaattagcttatactcagatacactcaggggaagggaatttataattctctaaggcagctcattctattttcagacagctctattgagttcttcattgtgaagtcaaagtctgcctccctgaacttccacacctctgaggagtgggtcaaaagacttctctcttccatatcatcaacctttaatatgtcttaaacaagttatagaatctctaacttttcttctctaggctaattcccattccttcaagggctcatcaccctgcactagacctaagaaaaagacccaagctactctacaccccctgcccccgagtactgaagtacttaggaagaatgatagttaaaagggggttacccttaagctagtcttcttcccaaataatggcgcccacccacctcattggtccgatgcccacagttctcgcagttggtagccatgatgataacctccttaaagtgagggatttctggaaaacggagttaaggaaatctacttccaggcgaacaagaccaccatctggggaaaaacaaagccaaaccccacacaaacatatgctggtcccagaactgcaggaaatattcacaagaggcagcccacagagtcctccagaagagggcaagttcccaacccatggcaatccctgttcacacatttgaaggcatggctcaggtcacacacacacagcctagtgaccatggcctaattttctctttgaacacaaaacccaaggtacacagtctaatcaaagataatatcttccttatcactgggtataaagcatgtgttttccttgaaagggatgctcccagcctgattataatcttcatgcctgagtcagatgaagagcaacccaactgcttggcaaaagatacgtactagcttcatgttggtctgagcgggggcattgcattctgggcagtttgtgctgaactggagcacctggaacacaacatgaggacaaagggtgagccctcccagatgggatgttcaggctaaagacactcagttggtatgctagtggtcatctatgttggtgacaaggaagacagatgctgaacagcatcagtctcagcccacaactctgctccttcctcaccagtagccaatgtgactcacttcatttctgagatcttcctcttctggcttctctgctggtgcttcttcctaaaatagcaaagatgcaggtcgcaagttggcaggtatacctcagtgtccccaacaccctgccctggagtgggagaaatgctcaggtgccacctcatcagttatgtcaggtgccacctcatcagttagagaaaccacaaagtaaagccccaaccaaaggaagaacaggacttaagataggatcacagccactgccatcctttctgtgaagtttacccaagtcctggacataagcaagatgagaagcacaaacaagctgagatagggcacacagagcagcagcagcaaaataagttccactgactccaagcaatccagagtgcgcgataattccagagcattcttctggatccttcagtccacttacttgaagccccagcatctcttcctgctgtcgggtccggttgtagtgtgtgatcaccagggcatcatctttctgaggagcatgtgggttttccacaaaactgttccctgagggatcatcaatgatctaacaaatgggagaagagagagtcactgcaaaagaaaatcataaacaatcctacatcacctactatcagaccacgcaggcatcacagtggaaaatcccagcagtcttaatggtccctcctcccctaatcaagggcaactccagcctctcaatactcaccagagtgaaaggggaggctacttgctttagctccttcagtttgacaatgaactcatcaattctttcagctgtagcatctttgtttgcctgccatgaacagagagtaaagcatcagccctggtggtgtaccttatgccctgccccttgtcatgcccatgttacttccattaggaagtcaccacctatctcagtgtgagtggaaacagagtgactcaggcttcacaatgagatgtagcaaacaagcctgaagttgacgggtggtgacaggtgagcctcatttttctcactcattcaaccatttagcccaggcactcatgccacgttagagatataatagtatatatatcagtcctctcatgggactccccaaccaattaaggagacaaataactaaagatgcagctataatatattacttctgtcataataaatataagatgcagtggaatactcaggaaacacagataacccaaggggattaggaaaggctcttcagaggtaatgttatattgtctgatgaggcctgaatatatactgagggagggaagtggaaaagacaataattataacatatgcaacattctagcagctccagcaccaccatatgcttacccagcaagtttccaacacttagtcagagactcttcagacacatgggacactctatataagcaattattccttgagctgctacaatcagaaaaccccagcttacccttcgtgcaggctggtcctgctccaggccagagatagcacgggtgatcaatccttcaacagtggtcagagcttgtgaacaagaacaaaagacaagtgtgacttagcctcagctctgctatcaagtccctgtatgaccctgggcaattcacttgaactctctgggtcttaatttcctcatctgtaaaatgagaaggccaggtgcaaggttccattcatgtctgataatagtgatgctaaaattctacaataaacacactatggtattaccattactttctaccatctcgagctgttttacctaagctttccactcatgattaactaatgaagattacaatgattacatggtagaacccatacacaaaccactagacctggcaccagggggttttgcaagaaagagggtaagattctagctacatgcgaacagcccaaatactctgatcttaaacttacctcctttctggctaaaggcaggaatttcaaaatctagctcaggaatccttgtggcagcagagtcagtcttcaccacttctctgttcatgtcctgggaagaaaagaatacgttcagtacaaagagactgcagaacagcttctcctcaagtaataaccagaccgtccccttccatcagaccgcagcccagctgtctctccctctcgccactccacagggtccagactgctcctttcgaatagtacaggtggtgtgagccaggctgtccaaatggtgagaatactattcataacaactactgctcatttcataccctcagacaacatttacaaagcattttcacaaatcttatctcacttgagctgatgacaacaccagtaccattttacaaaagaaactaaggctaggagacatagggggatttatttaagatccgaccgcctggaccagagctctgaccccagtaccgaatctctctctagaatactgaggtacctgctctgaggtcctctcacctccagagccctgacagacaaagtgtagcgcactccctggtcctggatcctgcctgccgactggatctccgtgttgttccagccacagtgctcgcaggaaaaggagctcactattatttctctgaagaagggaatcttggtgagcaggaggcgcgtcatgccctggtgaagtagaaagtagctaaggaaaaaaatcaatgaaactccctttccccgccctactatctccgggcgctcctcggggtccccggccgggcccacctggctgggtctgacccccggctcgtcccggcacaagccctacccacccgccgctcgcggccgcgcccccgcctcacattgcagtaacagttcatgcatagcgactcgatctcggtgggctgctgctcctcgtcctcggcgctgatgggccggaacaggtgatcaggggcaggcggcggggccggggcgggcgacggggcgacggcagcccccgggggccctggttccacagccccgctggccgccatggccaccacgcgcaattcagacctcggcttcctacttccgccgctctcgcggccccacccctctcccgtcacttccgccagctgccaccaccccaaaaaaagccgcagactccgggcactcggggaacaatgtcgtcaagggctcccggttcccgggtttatatggctcgaaccttacatcgccagccggatccacctcaactcagccgtcacttcccctaagacgtcctcttagaaccagggcacttttttgctccttcacaatagctccaccgcacggggttctattggtccctacgtcggtctacaagagccttgacgacaaggggctggacttgtccctgaggaatccctgagaaggtgcgcccggagccgggctgcttggttccagtgttgggccacatactgcttgcgtgctaggtcgcccctccgggtggctcagcctcttcccctctctcacaatccctgaatccctctgtccctttctgttcttcccactccctattctgtcctcatcactaccttccccaatcccagcctcaagtacacagccctcattttcactcctacctcctcatccccatcatagcccttgacctatgcttttccagtttcctaacaacaacaaaaacaccttttattatttctacctttctagcacttcctctctccaggtgctgggtccacaacccagttctgttgccaacattgtcaaaatccacggtgtcagggaagaccagcctgcaggcatgatgagcctacatatgtgtggggtctgtgctatggggttggggagcaggcaggtgctgagaacccggggacagtaggctgagctgggaggaaagggggccggacagggaagtccaaagacaaggagctgtgtttaccctttccacgtcctccaccacaccccagtttcagttcccaggggatctatagggagcattggtgcccctgagtgaggggagtccccagaagagagtccggcataaaaagaggccattcaaactctagaacagcaggaacaaaggaggcagcccacctcaggaatcttaggtccaccagggccacagctcttccagacacagcctgcattccatgcacagtgtcctgtgggggagcaggctagtgaacagtgcaggtgcagaggaagggcccgtaacccaggccctcctgccaggtgtgacagacagccgttgtctagccaggatccctgaagcagagcccagccagaccccctttgacagacctggactgggagtgggtggatgagaaagagcagcaagggaatggagtgggtgatgggtgtgctttggggatagtggtgaggccactgctttcagacatggtccaaatgagagtcacgccaggcaaacttctatcataaacatctatttcatttgagccagaagtctaggcttcaacttgggaacccagagggaggggctggagatggggagagcacacagtatgctccccagagggtttaaggagctcccacagttgggagggttcagtcccttatttaggtgtagagctatgtcaggaaacatgggctctgccctctcctatcacagcccacacctttcgtacccaccagcatcagagccagcagggatattcacacaccatcacatgttctccccatgatattctctttctcccttctattcccctgatagctgccatggcagccctggggagacaagtgctcctctctgtggaccagctgtagcagtggccaccaggcagccagaagtgactagagccaaactccaggatgtagtggcacaggcttccagcatcacggcaaacaggcttgcagataatcacccacatgcatggtgcctctccctccctactccctcacccttgaatggagtaactcatgagcattcccaaatgagcactgggaggctgggtttgcaaagcctggtgaatgtaatgcatccagattggggagtcgcaggaggctggatatgcaggagacagcagcccctttggtggcctccctgtcctgcacaggaccttccaccctccacccaacaggccactttcaaggactgaaccatgctagaggctcagagccaaggctccccagacaaggagctgggaatgggcctgggcaggtagatcctcaggggtcccccagatggctgtggccctggtcatgaaggctgtgagtgatgtcttcccacaggtcatccagacgggcctgcagcttgctcagaaccttgccactgtctgtttgttgaaactctggggcgaaggcactgtggcctggtggaggtggcgccagctgctgctggacctcctcagtctcctggtcgatggcgcgagtgaaggcagctatctgcaggtaggtgtcctggcggaaagcctgaagtcgctggcgcacctcctcggagagcatctgggggtccgggccggccccttcctcagtcccagtgcctgcaaaggctctgctgagctcttcgcgcagctggtccaggttctgctggatgcgtgcgtgcagggccttggccttgagcgtgagcttccgggagagcacctgcacgcagcgactgaggcgcgcggggctggcgggggcgtgcggagccacactgcggtgcagctcctgcacgtggcgcccgatgccgctcaccaggctctcggcgtatgggtggaagagctctttgaagcggccggtgtggtgcaccacgcggctctgcagtccctgcagcaaagcccaagcctcgtccacgccccccagcaactgggccttggtgtcttcccccaccacgcgcaactgctcctgcagctcctgcacgcgcagggccacctgctccatcagatccatcgtgtagggcttcagttgctgccgcaagccctccaaattccagcccaccagctcgtgcgcctctgccatgtagggctggaggcgagccttcacctcctccaactcctcctgcagctgccgccgcatgcccaccgggtcctgtgggagccgaggagcctcgctcccactcagaggcctcagcttttccaggaacttgttcatattgttgaggtcttgctcaaggctgtctttcagggtcctggagaaggggacagatatccaggccgtcagactgctagcccccatcatctcctttgtccccaagtcatcgcgcactgatcctctgggggaaccaaggacgcagggcgttggccccagggtcgagggctcttgtcctagccctggccagtaacaactcacgcacgaagcacaaacacattgcccatacaaatccagacctacaacactctccaaagaaacatagatgcgccacatcatcctttgattctggggactgcagcgggcgtcctcccgattgatcccaggtcccgcgcctcagtgagcaagggggcaacagctacggagttgtcaaggcgggggctgcaggcagagggcgctaaagagcccaggatggccgggatctgcagacagagctagcaccgctcctttcctctgtcccagcagcggccacagaggttgaggcagcagaggcaggtcatcatggcatggcccagctgtctcctcccttcgcctacaccccttcccctgggcactcacgcgggctcgcgagccatcttctgctgatggatctgctccaccctgcctttgtccccgctggtctggctgaagtagtcccagaagcctttccgtgcctgggtggccgaaaacgctgtggagagggactaggtaatcagggcctgggctctcctcccccagggtggacagggccctctggccagcctccacccacacccccacgttgaagtcagggtcggagacccacctgaaagaagagccagagcccaggtgagcacggcagccatgcttgccattacctgctctgagaagacaggtggagggaggcctggttaggggaagaaggagacgaagggacatggcgcaggggacttgcccagggggcctctgcaggggcaactgcccgaaatcctgttaccccttccttgggctggggagcacagagctgttggggctcaagaggactgacctaggtgagtcaaggaggctagggtgtcttcctcaaacatgggaagagggcgtgctcttgctacctcagtcacatagcagggagcgtggtgctctaaccccttcgcaaaggtcccagaccccaggaacagttctctaggccacttctaccacctctcccctgcccacctgtctccctccctcccatttcatggtggaaaaactgagccataatgagggcgaagaggcaactctgccaaaatgttccaagaggacgtcttaggggccaccccaggctctcccctgaggccacctgcaatgccctcccttaggactgtgacccccatccctctgccccagctgctcacctgctcacgtctgggcacagagagcagacattctgctttatactccagggccctgagcctctggcaccaattgctctgagtaaataccacgtggaagttcaaaagaagttgacctcagctgcctcccagcactcacctcctgccctttccctggcacccagagggttaatgagtgccctggtatcaggggctgccccagtagagaagtgcttcccaggagctttacgggggatggggctgaactcctcacccagtttctcccaaaccccatgacctttaaccttcccactgacctgctggctggcccaccaacagagaagaacctgtttgtctgccaagggcccctctcttacacaactacccagagtcactgtgtcccagccggcaagatggacagtgttcacctaccagccagaacccgagcagcccctgaaagcttcactacaggttccgcaggcatcctcagccagcattcatagggttaaagaccaaccacatccctctttatgaaacaatcctggaacaagcaagggaagccaggcagggtgaagatgagatggcaagaggcatctgggccagggactctgagccccaggaactggagcgaaagtgagatttgccccatgaggaaaagctgaactccactcgcagggcctctgaggagagcaagcccaaatgctcagatcttctctgatgacacacccactccgtctacagtactcatacacacgttcacaagctcccgattcttggtcctaaatgcatcttgaatcaatcccctctcctccatttccactaccatcattgcaccagttgtctgtcaccttgattgcattcatagcctccaacaggtctttctaccacactcctgcccatttaattcatcctccactgtggctcatcctgactcatttccagtctcatctgctgccacataaaaccacagcattccctgagcctttatacaggcttccctctgcttgaaatagcctatcccctggtgaatatatattcattttttagagttagtttgtattagttagaattagacttggctgcaagggacatatatatgtgtgtatatatatacacacacacatgtatattttatattcttgcatacatatatgtatatatatgtgtgtgtgtatatatacacatatatatatacaagatactgctcttaccactcatactgacatcccattggccacaagttagtcacatggctacacttagctgatatatatgtgtatatatatatgcaagagaatagcttaaacaaaatggagtcttatttccttctcatgtaaatgtaggccagctcgggctgcttttatcttgttgcactattatcatcaacaagacgctcatatccaagttccagctgcttcacctccagctaccaagttcacctcccagggaacaggaaggaggaaaaggagaaggacatgttccttccttttaaagacacatcccagatattgccattaccacttgtactgacatcccattggccacaacttagtcacatggctacacttagctgaaaaggaggctgggaaatatagtttttattttggatggctgtatgcctagctgaaaaaggactctattactcaggaagaagagaagaaaggatttgagggaacagtagtagcccctgctacacagctccagtatcactctgaatgccttcttcggccttcacctttttctgctctggagataaactgattccacattattcacacaacactgtatattcctggattatagcacttactatctaactgcacaataatttgttgatgaatccgagagctctttgagtgcaggggctttttcttattcatctctatatccactagtatgttttgcacagtgcctacctactacatacaaagttaagtgactgaattcaatcattcatttgatttaggaactgaggtttgaggagatcaagtggcctgtccatcatcacgcagtaagagttgcaaccagaatcagaacccaggtgcttggctctggtggttcaagagagcagactatgaccaagtcacaaaggggcttgtgcaagcagtcactgaaaggtacatgatggagagatcactcaggagggtggccagagagaaggcagaggaactatttagggatattttaataatccaagtgagaaatgaaggcctgaagtatggcatagcagtgatggttgataggtaagtatatattgagggctactaaggcagcagagttgatagcacttggtgactgattggatgaggaaggtgaaggagaggaaaaaatcccaatgattcccaggtttctgagcaactagggggatgatattttctttcaccaaaaaaaataagcaggttgggacaggaagtgagagctcagattaacaggagtcctaactcgaacctaagctgggtttcagataggcatagggcaagcccagttgaggtctatttgcttaatggctaagaagcctcctaagagaaaattcatttgaaaggaaaaaaagcaacaggagctaccatccagtcacaaaaccacagtcatcaaaagagaagagagactcagagtatttgggaagggaacatttccaggggttgaaaaaatgtgggagtggagagccactgaaattgactttgggtgattacttgtacccacaagctagtgtggccttgtgcccaaaggctgtccactggagatgttctggcagttggatacatatgtctcaagcccaggagagaagtctcggctggagactgagttttgggagtcatcagcagataggagcagtggaagacttgggagtagatgaaatctctagggagagtacatggcaggagaaaagaaaaacgctgaggtcagaaaacaccagtattggccgggtacagtggctcacgcctgtaatcccaacactttgggagaccgaagcaggcggatcacttgaagccaagagtttgagaccagcctggccaacacggtaaaaccctgtctctactaaaaatacaaaaaaaatagccaggtatgatggcacacgcctgtaatcctagctacttgggaggccaaggctggaggagtgcttgaacctgggaggtggaggttgcagtgagctgagatagggccactgcactccagcccgggtgacggagcgggactccatttcaaacaacaacaacaacaaaagaagcctttggcagagaaaattaacgctttccaaagatccatgtgctgtgctgtacttcccagactcctttgcaattagattggggccatacagttagttctggccaatgggctgtgagcagaacaaaatgggttacttctgtttgaggacaatgaagagtggatgtgagttctccatattttttccttccttcccctacagtggaagcaaagaactccaagctggcactattacaagagggagagggtctatattctgagttagtgcttggagcagcacctcccacctaaaagaggggcagagaagtagaagtataatcaaaataaagaagaatcacagaaagaaaatatattagttaaattatatatttggctgctctgagagagacccaaaataacagtggcttacaaaagctggaaatgtatgttttctcccatacaaaacttcacgctggtatgggagcactgctccacaaagctgtccagggtcctaagttccttctgtctggaggttctaatatccctatgtgtttcccttgtccacatgatctaagatagcttaccaccatgtccacatccagccactggaaagggggcagggtggaggagaggagagtgtagaatgtactctcctttctttctttttttttttgagatggagtttcgctcttcttgcccaggctagagtgcgatggcacaatctcggctcatcacaacctccacctcccaggttcaagcgattctcctgcctcagcctcctgagtagctgggattacaggcatgcgccacgacgcccagctaattttgtatttttagtagagacgaggtttctccatgttggtcaggctagtcttgaactcccggcctcaggtgatccgcccacctcggcctcccaaagtgctgggattacaggcgtgagccactgcacccagccactctcctttcttttaaggacaaaacctaacttcttctcccatctcactggtcagaactacttgtaaggaaggttaggaaatgtcatctttgttttgaatgggcctgagttcaatgatcagttaaaaatcagggattctaccctcatacattgctggtgggattgtacaatggtgcaatttctttggaaaacagttcggcagttcattaatggttaaacatggaggagttctcctatgactcagcaattctattcctaggtataaaaccaagacacatgaaaatacacatctgcacaaaaacttgtgcattaatgttcatggcaacattattcataacagtcaagaaaatggaaacaacccaaatgtccatcaattgatgaatggataaacaaaatgttacctatccatatagtggaatattatttggcaataaaaagggttgaagtactgatacctgctacaccacagatgaacctggaaaacattatgctaggggaaaaaagccagtcacaaaagactacatgttgtaaaatctcatttgtataaaatgtccagaaaagacaaataggtagagacagaaagtagactggtggctgcctagggctattgaggggaggggaggttgattggggagaaatagtgaataactgctaatgggtgtggggtttctttgtgggatgatgaaaaaagttctaaacttagtttgtggtgatagttgtacaaatctgtgaatatactaaaaaccattcaattgtagtgaatgttatggtatgtgaattatatctcaataaagatatttctaaaatcagggattttataactgagaaagaagggaagaataaagttgcagaggagacttgcagcctctgccacaccaaggacgaaaaggtttcaagagtgaagaattaatggcttcccaccatggcagactgagctgagctgaggctgtgttttcaatgcttttctatctctactcttttttttttttttttttttttgagacagagccttgctctgtcaccaggccatacagtggtgtgatctcggctcactgcaactaccgcctcccgggttcaagcgattctcttccctcagcctcccaagtagctgggagtgcacaccaccacacccagcgaatttttgtatttttaatagagatggagtttcaccatgttggccaggctgatctcaaactcctgaccccaagtgatccgcccacctaggcctcccaaagtgctgggattacaggtgtgagccatccccctggcctctatctctactcctaaaagaaccatttctgaccacttaacacccattagaatgttattttaaaaaataaaataaaagccaaaaatagcaagtgtgggtgaagatgtggagaagctggaccgcttgtacgctgctgctggaaaggtaaaatggtgcagctatggtggagaacaatacggcagtccctcaaaaaatttaatctagaattaccttatgacccagcaattccacctctgggcatatatccaaaagataaaagcagggactggagcagatatttgtatgctcgtgttcctagtagtattatccacaataaccagggggtggaaacaacccaaatgtccattgacagatgaatgaataaacaaattgtggtatatacagacaacaaaatatcacttagccttaaataatgacaatcgggggccaggcatagtggctcacgcctgtaatcccagcactttgggaggccgagacgggcagatcacttgaggccggaagtgcaagaccagcctggccaatatggtaaaaccccgtctctactaaaaatacaaaaattagccaggtgtggtggtgcatgcctgtcattccagctacttgggaggctgaggcacgagaattgcttgaacctggaaggcagaggctgcagtgaactgagattgtgctactgccctccagcctgggtgacagagcgagactgtgtctcaaaaaaaaaaaaaaagaaaagaaaagaaaaggaaatctgacacatgctataacgtggatgacccttgaagacatgatgctaagtgaaacaagccagtcgtagaacgacacatactgtgattctgaggtatccagaatagtcagatttgtagagacagaaagtataattctggtttctaggagaagtgaggaaggagaaggtattggttaataggtacaagtttctgtttgggaagattaaaagtttctggagctagatagtggtgcacaacagtgtaaatgtatttagtgctactgggctatatacttagctacaatgtacaatagctacaatggtaatttttatgttatgtatattttgccacaatttaaaaaggaatttctcatactctaatggttttttgctgataacccaaacttaaagagcctgtgctgtaaaatacaactgcgctggattgtctttttgcaaatagcattatcagtgccctttctaaggtcttttatgagatgcagaggggacacttggaactattaatacattttctagaatcccttctctatatgagcctaggttagagtcagccagcgtgagacggaagaggagaggccattatgtttcaatgccggttgcagacagaagcatggacaggcttggagtttaaagcagcttctgggtgaccttcccaggaatcacatgcattgatattgcaggcataataaggcgagcttcccatttgtagccacttactaatgagcgtttgagagtcactccttctgaactgcaaaccaaggtggtcactcctccagcccttccaagagttggataaacctttaattttttgttttaaagcctttcatgcttgaaatacgtggaatggcttttgtttttctgactgaacctggattgatacaatgggtagatgcaacacacactcatgcttccctgtttggtggcatcttatagtttcagtgttgaacatgttttgagttggttggaggtatatgtatatgtgtatgtggtatgtgctttgtgtgtggaaccatttgaaataattatagccaacatgacacttcactctgaatacttcaacatacattgtgaaaaataaggactcttttacaaaagaaaaaaacattatcatacctttgaaaattaacacaattccttaatatcatctaacatatcctacatattcagattttccccaaaatgctttcatagttgtttttctctctctgtaaattcaagctctaacacatctcatctggttgttatcccactttagtttttaaatttagaaccgttctccccaaccccaccatttgtttgttttcatgacattgatttttttttggaagagtgcaaggaggacatcttgtaaaatgtcccacattctggatttgagtgattactttctcatgattagattaaggttaaacatttttggcaaaaatactaggtgatatctggcccttcttactgtatcctagctggaggttgcactctatttagtgatgttaagtttgatcactccattaaagtgataacaaccagatttctccatggctagtaaagtttggttttttacgttattgataagtaatttgtggagcaatactttgaagccatgtgagcatcccattctgcaacaatttttcacccaatggttttagcattcattgatgatccttgcctgaatcgaatattatcctgagagttgccagatagtgatttttaaaaaattctaggccaggtgcagtagctcatgcctgtaatcccagctctttggaaggctgagatgggaggatcacttgaacccaggaatttgagaccagccttggcaacatggcaaaacctgtctctacaaaaaaaaaaaaaaaaaaaaaaaaactaaaaataaaatacaaaaattagcctagcatggtggcacacatgcttgtagtcccagccactcaggaggctgaggtgggaggatcaccagagcctgggaggttgaggctgcagtgagccgtgatcaagccactgcactccagcctgggccacagagttgcccaaaacaaaatgaaaacttaaagaattccatcattccagctacatttattatccgatttcttctgtaagtaagagcttttagggaacttgttcttaaatccagagactttgaacagattccttccaggtgaacttgtttgtgctgccctttccttgactgtcgttttgtatcacagtgtttgcggatagctgcatttttaagagagttgcccctctactttgttttgtgtttttgttttttaatacacaagaattgctgactcattctggatgtgtagtaagaaggattttaaaatgtagattggtaaaggttagcaggtaccttattccttactgctcagcagcagcacttttgccttaaacacatggattaagcaagtgtatgggtctcaaatagacacttgatatgcaccaagtgagaagatcttctagagtctttcttttgtgacctgttctttaaagcaacattatgacttctccttctgaacagtaagtatttttttttttttttttttttttttggcagagtctcactctgtcacccagggtggctggagtacagtggcgtgatctcggctctcggcaacccagtcacttgggttcaagcgattctcctgcctcagcctcctgagtagctgggattacaggcgtgtgccaccgtgcctggctaatttttgtatttttagtagagatgggggttattccatgttggccaggctggtcttgaactcctgacctcaggtgatccacccacctcggactcccaaagctcccaaagtactgggattacaggtgtgagccaccacacccgggccaagtaaatcttgttacaaattgttctccttcagtcttgtcttctaagaactcagatgtaaactgtgaggtagcagtctttacttggtgttcctggactccatctcagaacgcaccaaaaacatctatatgattgtggagccactctacattgtttctactgctatcaccagaccttaatggaggtgtgggttttttaaaaatcaatatacatctcaaatacatttcagaaagaaaggtgtttatgcttaacgcagtgttaaaactatcccagcaagaaagtagtaacctgtgtaagcatttttttgtttctttgcttgtttgtttatttgtttttgagacaggatctcactttgtcacccaggctagagtgcagtggcatgatcacagttcactgcagcctcaacctcccaggctcaagcaatcctccagcctctgcctcaagcaatcctccagcctctgcctcccaagaatctgtagtttctgggactacaggagtgtcccacaacacccagctgattttttatttttttggtagagaaaggatctcactatgttgcccaggctggccttgaactcctgggctcaagcaatcctcctgcctcagcctcccaaagcactgggattacaggcatgaaccaccatgcctggccttttgtttgttttgaaataagttctatttgtcaaaaagaaagagaattaaatagaacatctataagtgaaaaaaatatagtcattataatataaaacacatttagctacagttggagagagaattagtaagctagaaggtagatctgagaaaatcacacagaaagaatcacagaaataaaaaggaggatattgaccaggcacggtggctcatgcctgtaatcccagcactttgggaggccgaggcgggtgatattggccaggcatggtggctcatgcctataatcccagcactttgggaggccgaggtgggtggatcacctgaggtcaggagtttcagaccagcctggccaatatggtgaaaccccgtctctactaaaaatacaaaaattagccgggcgtggtggtgcatgcctgtaatcccagctacttgggagactgaggcaggagaatagcttgaacctgggaggcagagtttgccgtgagccaagatcatgcaattgcactccgtcctgggccacagagcaaaactctgtctcaaaaaaattaaatataaaaaggagggtatgaatagacggtaagagacatggaggacagaatgggaggtccaatatatgcctgtaggatttccacgaagagaacacagggactgtggaagaggcaatattcaaaagatgatggctgagaaatttcaaacattgaagcaagatgtgaccggaatcctcaggtacaggaagcatcctgagtcttggtaggaaaaattaacacacaaccaaatgaggacacatcacaggaatctgcagaacactgaaggcaatggatatcttaaaatcaaccaaagagaaagactaatgatctacacacgaagcatgattaaaccggcaactgatttatcatcaatgtaccttctaaagactgaaaggaaattaatggccaaccaagacttatactcaggtgaactattatttgagaggaagaagttaatttcagagaaagagagtttaccactcacagatcctcactgaaaagaactactaaaaatctgaaaaggaaacagaacccagaaaaaaggaataggatagaaggagacatggggagcaatgaaattagtaaacgtttaggtaaatccaaaaaacattagtgaaaatacacacacacacacttatgagactagttttcactaaaaattggtcaaatagtggcaatttcatatagttctacctaacaaaaatgtatttacacatagtttagtttgtgggggttttgtttgcttgtttgtttgtttgttttttgagacagggtctcaccgttgcccaggatggagtgcagtggtgtaatcactgcagcctcgaccaccctgggctcagatgatcctcccacctcagtcttctgagtagctaggaccacaggcatacaccaccatgcccagctaatttttatatttttttgtagggacgggggtctcgctatgtttcccaggctggtctcgaactcatgggctcaagcgagctgcccgcctcggcctcaaaagtgttgggattacaggtgtaagccaccctacacctggccaagtttatctcatttcctactgtactcccagtgcctagaccagtgcttatcacatggtagggagggctcaaaaacatctattgatgaagggactactttggaggaggtgttaaaagtaatgaggaactaaaatatcagaccgaagcaacctggaaatgggaaaggagagatcaaagtgaaagcattcagcagcctttgcattattcgggagaaagatagggatattgattatctatagactttgttaggtcagacaagaatattaaaattttaaggataacccataaaacgaatagaaagaatggataacttttaaactagtatatggggaagagagactaaagagcatccgattgacttctagtaacggacggtggattaattgcatgcattagcctctgctgttctctgaaatctcaataacgtggcattgaagtgcactttttacaaaatgcataaacccaaagggaaaatagaaaaggagacaaaaataacaacatttgggaagctggaaagcttccaaatggtcaaacggtggtgacaggcacacctgacatgaattttgaagcagcagtggagaaagccaagaaggcccctgattttcactactaaactctccaaatgctctgacattagtgtcaacattcttctggaagagtgggtggcagtgggactagaaatatggcagttggtcgagagtctgtttgagaagcagctgttctcttcaactctacttggctgggtacccccaaagcagcagaaaaccagatgcttattctctctgaaaagggtaaaagagtgggactccggcctggagaaaactaggtattgttgggggccagggtttttgtgctaagaaaaattaaggaaaactttatacattaaattttgaggctgggcacagtggctcatgcctgtaatcccaacactttgagaaggcaaggcaggaggatcgcttgagcccaggagttcgataccagcctgggcaatgtagcgagaccctgtctctgcaaagaatacaaaaattagccaggtatggtggcacctgtggtcctagctactcaggaggctgaggcagaaggattacttgagcccacgagttagagaccgcagtgagccatgatcatgctactgctctctagcctgggcgacagaatgagaccccatctcaaaaataaatttttttaaaagactcctcagttcaccatctttccccatattgaaaatggaacaacattctccctgagaaatttggctggcccaaggaaataagcctaaagaaactgacttttgggggttccctgctctccagatggtccctcctaaattgaaccatggactcaggatttcacatcagcttcttctaatttatgcagctttcttctaatttactgtggggttttttcggtgttttttgttttgttttgttttttgagacagggtcttgctctgtcatccagctggagtgcagtggtgtgatcatagctcactgcagcctcaaactcctgggctcaagtgatcctcccacctcagcctcctaagtagctggggctacaggcatgaccaccacacctggctaactttttaattttttgtagaggtgggggtcttgacatgttgctcaggctggtcttgaaatcctggcctcaagcgatccccctgcctcagcctcccaaagtgctgggatttcaagcatgtgccactgtgcctggctaagaatacttaaaggtgaagtgagaagttcacatgatgtcatatcaggaggtacacaatggctacttgtcccactaatagcaatccttagttttttcacttcgtgaggtggtcactagcagacctcttggttggaaagataggttatttccctttgtaattaacaagtaacagaattgggatactttggcatcttaaaataccttggcaacctgatgaacatagcatacattcaagatttttgcctgaattaattattacattagaagagttgcagaatgagaatgttctaattctactatttcttttatatatttcagctgatgttattctatgaagaaaagctccctcatcagtgaagatgaactgcacttctttctaaagaggcaatgtcagacgggcacggtggcctataatcctagcactttgggaggccgaggagggtggatcacctgaggtcaggagttcgagaccaacctggccaacatggtaaaaccctgtctctacttaaaatacaaaaattagccgggcatggtggcacatgcctgtaatcctagctacatgggaggctgaggcagaagaatcgcttgaacctgagaggcagaggttgcagtgagctaagattgtaccactgcactccaggctgggtgacagagtgagactctgtctcaaaaaaaaacaaaacaaaacgaaacaaaaaaacagttgacagtagttgtttttgtagagtgaaaaatagaggtgggggttgagatactgctgctattttaaactaacttgtagatctgtttgactcttttttaaaaaacaattttttggagagatgaagccttgctatgtagcccgggctgctctcaaacccctggcctcaagtgatccccctgtctcgacctcccaaagtgctggggttacagacataagtcaccacacctggctctgtttgactctttatgtgcagtttgaactttttaactgaattttttaaaaggtgtgaaattagtctttaaaggaacacaaaaccaacagagaagcaagcaggaagatacaagaagcaaagaaatatcatagtaaaatgaaaatacaaaataatatgacataaataaaacagtaatcactatcaaattaaatagattaagtgagcccacaaggcattgtctctgggactagtccgctgggtcgaagtcctgccacttattggttctgtgacctttggcaaattatttaacttctctgtgattccatttctttcttttgttttctttctttcgtttttttttttgagacagagtctcactctgtcactcaggctgggtgcagtggtgcaatcaccaatcacaacttactgcagcctccacctcctgggcccacgcgatcctctcacctcagtctcctgagtccctgggaacacagacatgtgccaccctgccaagctaatttttaaattttttgtagcgattgggtctcactatattgcctaggctggtctcagactcctgagctcaagtgatcctcccgccttggcctcccaaagtgctgggattacaggcatgagccactgcacccagcctcaaactctgtaaaaggggaataatgataatacttgcctcatagggcttgtgggaaataatgctttattactgtaggttaaaaagcacacaaacatgcttgacacagtaggtgctacatcagtttactattgttgttgttttcagattggattttataaaaactctacttatttgcaatttataagaggcatacctaaaatataatgtcagagaaaggttaaaaagtggagccagggaaggaatttaagaagacataccagaccaatagtaatcaaaagaaagcaggtatgcaatgtaacatcagaacaaataagctttgcttatttggattgatagggatagataggattgatagggataaagcagatcattatttaatgatcaaagaagaaatttggctgggcgtggtggctcacacctgtaatcccagcgctttgggaggccggggcagggggatggatcacaaggtcaggagtttgagaccagcctgaccaaagtggtgaaaccctgtctctactaaaaatacaaaaaattatccgggtgtggtggtgcatgcctgtagtcccagctactcaggaggctgaggcaggaaaatcatttgaaccggggaggcagaggttgcagtgaactgagatcgcaccactgcactccagcctgggtgacagaataagactctgtctcaaaaaaaaagaaaaaagaagaagaagaataaattcactgggaagataaaacaattctgaacctgacaacatagtctcaaaatacgtaaagcaaaaagccactgagtcccaaagagaacttgacaaatttggtaggagattttaataccatttcctcaaactgatggaatcacagaaaaaaaatataagaacaagtcagcaaacttgatatggaaagaacagcatccccacctgagagtcagcagcctccatgcaggaggaccgaggggaagccagggagcagggcagcctgagccaaggccaagcccagttgaggacaggaagtggaaggaggcacctaggaaggctgaagatgcagaggagtgtgttccagaggcagtgggaaaactgggagggaatagttctcgggatgttggatagagagaataagcaaagaacaatgcaggaagaagagtggggtgggaggccgtgaccttgctagagagccttatgttttgggctatgaccagggctgacagaagtgtgaggcatggcgggttcagaagagagatcaatgatgcatcgcacatctctaaagctgatgaaggcagcaattggcactgaggccaacctggttgggactcagagaggtgggacacatattgtgtgccaggcaccctgccacatcttggagagaataagacacaaaccctcatctagtgggttggggaaatgatgcagggctcagtgtggctagcgcgttggggtgggaagcagcctgggcacgcccacaaggctctctgccttccagaatctggcccagttgggtttgaaaagatttaatgacaatgagctctctatggacctaccttgtgcccagtatttacctttcttatctgtaacgctcaagtcaatactctaaggtaggaattgttatcctcattttatttacagagaaactggagttcagagagattcttgcccaaggtcttgccctgggccaattccaggtctatctaactccaaagtccatgctcagtacactgtctcctgcttgggagcaaagagaggactttgctcctaagaccagacccataccacaaagagcctcaacacttaactactgggagaaaacaccgtcctaagtaaaaagccaggtgctcttccccttaccccagggggtttaggatttgggagaaagaggcctgatggaatataggggtaccaggtccatgtgttaactgatctgggtacaagaacagtaactcaaggccagccagggaaagaacagccaagccgaggcacagctgccaagtcatcacctctcgttccttgtcccaccatgccttgtctcagcacgaacataaccccctcagtttccctcttctcctgtctcctgcataggcagaaccagttctgagtgatagccaggacagcaggtcctcgggtcctcaggcttgccactacaacctgtttaccctgcgcagaccatgatccatcaggtcgagaaatgccccactgctagatgtttgtgtcaaaaatgcctgccggtggtgcaacagctgggtgggaccagtgacgtggacttgagtgccacaaaatgtaccgaacacattctgagtcaacatagtgatggtgtgccaactccagataaagattttcattattatttgtttgggttttgtttatatgtactcctcttcatcaccaaagatttgaggctacagaaaatgaaaattgaaatggtaataaaagagaggggcttgcagagaggaccacaggatggggaaaatagaaataatcgcagaaaatcatgacccgatgaagagcacaatcatagaagcactaacagatgacaaggttgccagatcttcaccattggttttgggtttcgtgaaaacccgcgaagagagggattcagtcaattacatattttttttccttctttcttttatttttattttttattttttcttgaaatggagtctcattccgtcaccaaggctggagtgcagtggtgcaatcttggctcactgcagccttcacctcctgaggttcaagccattctcctgattcagcttcctgaatagctgggactacaggcatgaaccaccatgcctggctaatttttgtatttttagtagagactgtcacacgcgagacagggtttcaccatgtttgccaggctctcgaactactgacctcaagtgacccgcccacagcagcctcccaaagtcctggaattacaggcatgagccaccgtgcctggcttgttttaattttttattataaacaacactgtgatgaacatccacatagctaaatgcatgcattccatgatcattttcttaagataatttttttcttattatttgtgtatttatttatttatttttgagacggagtcttgctctgtcacccaggcaagagtgcagtggcacaatctcggcttactgcaacctccacctcccaggttcaaacaattctcctgcctcagcctcttaagtagctgggatacaggcacaagccaccaagcccagctaattttgtatttttagtagagacagagtttcgccatgttggccaggctggtcgccaactcctgacctcaggcaatcgcctgcctcggcctcccaaagtgctgggattacaggcgtgagccacctcacctggccttaagatacatttttgaagggaagaacattttctgtccaagtacattcctgttcacaaacccttttccataacactggagacttcctggggaggttggaaccaatggcttagactccaaaggaatgaatgtaccataaagctttcagcaatcttctgtcaatgctacttgtatagacttccagacaaacattgaagattgaatgcatgcatctaatttcacttttttttcctgaaatcctcctgaaactataatgaagaaatgtttgggaaaagatgtagccaggcactgtggcttatgcctgtaatcctagcactttgggaggccaaggtgggcagatcgcttgagtccaggagtttgagactagcctgggcaacatggcgaaaccctgtctctactgaaaaaatacaaaaaatcagccaggcatggcagacctgtagttccagctactcagggggctgaggtgtgaggatcacttgagcctgggaggtagaagctgccgtgagccctgattgtgccactgaactccagcctgggcgacagagtgagaccctgtctcaaaaaacaaaaaaaaaaaaaaaaaaaaaaagagacgggatcgggaaaaggaagaaaagaccacagcacaattttggatgttagaaagcaaatggaccagttgtaactgatttagccggccttgggaatgctggtcatgagctggcagtgagaaaagatgagttccagcctgacttacaccgctggattctcaaaaggcgaagagatgatagtagggctcctgccagcccacgctgcacctgtgtgtgcaatagaaacagcctcccctttctcaagacactctacagccgtctgccagaaatttgacatgataaatatacaaatctgtcatgtctaccctgtgagggaggtggcctcagaatgatacagtgcacagcttgcacagccatatatgactgtcctgaattgggacaccagtttctactgaaagtagaggtgacggaggaggctgtcataaaacatgaaagattggttgaaactatttaaggagcagttagagctttagcttccctgtctcaccttagtagaagactggaagtttattctcttgaacgtcaggcagagttgagggcaggagacctgtactagcaagaggattaaatcaaagtataccctctgaaatgctgaatcaccctcctgcttcttccacttggccccagggacactgtattcaggcctttaccctccaggcagaagaatgaaagacatttcttaggggaatatgtccagctcaagaggtaagacccaaagattttcacaatggggttccccagctaaacatctcagtggatcaccctgcagtgacattcatagtcaataagtactacgcacgtattggagcttcaaatcacctttaaaatctcccattcttttcttttttctttttgagacagagtctcgctctgtcacccaggctggagtgcagtggtgcgatctcggctcactgcaagctctgcctcccgggttcacgccattctcctgcctcagcctcctgagtaactgggactacaggcacctgccaccacgcctggctaattttttgcatatttagtagagacagagtttcaccatgttagccaggatggtctcgatctcctgacctcgtgatccacccaccttggcctcccaaagtgctgggattacaggcgtgagccaccgctcccagcccaaatctcccactcttaaacttaagcaaccaaggattaccagtcatttgaggaaagattctaacatgaaagatagagacccaaaacaaacaaatatttaaaaaggaagttagagaaaactgagaatatacagaaagaagaacattgaaaaatgccattaataacatcagagaatgaaaagattacattgattaaacaagaacaggatagtataaaaagaccttcacagaataacaataacaaaaactcttagaaattaaaaaaaagatagtagaaataaaaactgaatagagagtaaagaaatagttcagaaagggagagcatgtagagattgaagtaagaacaaagataagaaaatgagaggatccacgccgggcgcagtggctcacgcctgtaatcccagcactttgggatttaatataaatatattaaatattttaaataatataattttaaataatataaatatattaaatatattaaatatttaaatatattaaatatttaaatatattaaattcattcagtcaacaaatatttattgaatacctactaagttctagtcatcatgctaggcactgactgttcaagaataaacatagacaagacttctgccctttcagaaaccagccaagattcttcaacccaaggcagctgtgaagtataacacatctctggctcaattttctccatatggtttggggttccatgaatgagtctgtgggaagatttcctgtacgtagaatgcatgcataaaggaataattattctatggttcgaaagagaaaaaaagtaagatcaaagtgtagaagctatgttaagaaagattccagtttaatgatttttgaaagagcagtaaaaataagaccaagatgtggaagctgtattgagaaagatccaatttaattctaataatctttaacagaattgcccaaagatagaatgaattgttttgagagatggtacagttagctgtcagtgggagtgttcaatactaagcaagattcactcgctcaaccattgagtgatgaccacatgcaggcactgtgctaggctctctgtattttcagtaagctattgttgtacaacaaagcaccttaaaacagtgtcttagaacaacagtaaatgtttatgatctctcacaaagtctgtgggtcagcagcttggctgtgtgtttctggttcagagtctgtcatgaggttgcatctgaaggcttggctgaggctggaggatctgtttccaaggtgaatcactttacatggctggcaagttggtgctagctgttcggaaggggcttcagttcccccctgtgttgacctcttcacagggctgcttgcacgtcctcccaacatggcagctatcttccctcagaatgagtgatccaagagaaatcaaggtaggtgccacaatgccctttatgacttagacttagaagtgaaataccatgacatagcctattgatcacacatcagccaccattgtgagggctagctaccacatcctgcaaatacaatgatgaacaaacaaatggtgtgcctgagctcgagggctgttagcctagagttaagatcattccttaaatgatatcaaaggaattagggctgagagacaaggttgttccctccaaccctaatgccctgtgatcttatgattccaggtcctaggtcttttgttcccatatcaccaatccattatctcagaaccagcagctcaccaaaccctcgctcctcagatgtgggccattcgggggtttttattgtgcccctgcattgtcagctacttgtcatcacacagcaagatagcatgactccaccctgcacgctctcagacaggagacaagggagtgcccaaataaccctaagcttgttgtttctgtccccaggacatacctcagcctcctcctgggagcacagggcatactatgataacagcaggaggacacggcgtccccatgcaggagctgcttttgatcctgccaggacaatccctcaagagcagcaaggccctgtatgtacaggaagagagtggccctcagatcacttccctttgccctaatcagggccacgtagtacaccagagacctcaggggtagtgaccctggatgttctcagaggacttctgacctttgaacttggggatgggcataggagtgtggctagcatctcagcctggcccaaaccagtgctggtcagcatgcctttgaggcactaacccaggcccacagaggagtcatctacttccaagtcacctgaggagccagtggtgaccagggagataatggcctgaaattgtgctggctctgagggactgttgggtaagctaatgtgggctgggctggagttcaaacacacctccctggtgcccacagggacctcccagcacacgctctcctatgggtctcaatgattcagtctttcctggtggcatagactgtagcctggagaagctctggggaatacttcttttcttacttatttctggttttaaaagtactactctcaggatgactattgttaaaaacaaaataaaacaaaaccaaaaaataacagaaaacaacaagcgttggagaggctgtgaagaaattggaaccctgggcgtcaccagtgggaatgtgaaatggtgccactactataaaaaaacagtttggcggttcctccaaaatttaaatatagaattaccgtgtgacccagcaattccacttctggatatttgctcagaagaattgagagcaaggactggaaagatatgtgtacacccccattcatagcggcagttttcacaattgcttaatggatagagttttctgtttggggtgatgaaaagattttcagaaatagtggtggcggtggttgcacaacattgtaaatgtaattaatgccactgacttgaacacctataaatagtttaaatggtaaattttatgttataaaagtaatactaaagtggtggcatttttttcttttcttcttcttcttttttttttttttcttgagacagggtcttcctctgttgcccaggctggagtgcagtggcatgatctcaactcaccccagcctcaacctcctgggctcaagcaatcctcccacctcagtctctcgagtagcttggaccacaggtgtgcaccaccacacttggctaatttttgtattttttgtagagacaagttttcgccatgttgccaggctggtctcgaactcctaggctcaagcaatccacctgtctcagcctcccaaagtgctgggattacaggtgtgagccaccacacctggcctaaaatggcatatttttttctttctcttctttttttttttttttggagacagagtctcactctgtcacccaggctggcagtggcatgatctcggctcactgaaatctccgtctcccgagttcaggcgattctcctgcctcagcctccctagtagctgagattgcaagcacgcaccacaaagcccagccaatttttgtatttttaatagaggagggggtttcgccatgttggccaggctggtcttgaactcctgacctcaagtgatccacccgcctcggcctcccaaagcgctggtaaaaaaaaaaaaaaaaaaaaaaaaaatcccattccaccacttgctaggtaatgtacctcaccattctgaagtgcctcttcctcatctattgtgtctttgatgtgatggtcgatcatgagaattatatgagccaatatggtaatataaggtggtttttaaaagcacctcacactaccagcattgcagtcagcaatgaattgccatccttgcattgaaaagctctacaaccgttgccactgggcatttcttattggccatcatttgtagggggctttcacctcctcatgtattccctgttttcccttctgtgacctcccctcctttcctactcttcattaccacctcaaatgccagtgcagggaatgcacggaacaattgactccatctctctgccttgtggtctctttccagccagttcctctgggtgtcctggtcaacagctagcatgcactgtcaatgacattctctctttcagaggtattctaggtctaactgttaagctaacaggattttcacttccttacacgttcacataccaatatgtatgtgtgttccttgaccgggttgtaaagtacataatagttgaaaccttgctttttttttttttcataaaatatcttggacatcttcccataaataaacagattccccaaaccaaaccagagtgttttgcttgaactcaggacctcatgagagatctgagaccagctgttagagaatctctgagaagggcaggtagaggctgttgcccaggtccccagtcagctcagccgctggagaggagcagaggactgactggccacagggggactaagtccacctgctagctcagaacaggaggaaggctgctttccttggaagatgggaccaaccctaatgaggactaataagtgtatctcagacaaaccaattgaccaactggaacaggccagagatgagggtgtgtcttccaaggcccaaagcaagagaaacatccctaagagggaaggggtgtgtggggtgtgtcaatcaaagtgatgtgtgtgtgtttgtttgtttttgagacagagtcttgctctttcacccaggctggagtgcaatggcctgatctcagctcactgcaacctccacctcctgggttcaagcaattttcctgcctcagcctcctgagtagctgggattacaggcgtgtgccaccacacctagttaatttttgtatttttagtagagacgggggtttcaccatgttggtcaggctggtctcgaactccctatctcaggtgattcacccacctcagtctcccaaagtgctgggattacaggcgtgatccatcacgcctggcctcaatcaaggtttttaattgctagccacagaaacctactctggaagacataatcagaagatgaacttactgacatatttccaggaatttcaaggaaatgtctaggaaagctggagtacttggtttggaaaataaacaagaataaggggagctgagggagaaacatggccatgctcatgccacagaactagagtgatggggacggctgtgctgtcaccactgagccaggatggggacagcccagtttgcccaccagccactgccacgcctggtccctggcctgaggctctagcctggccgcaagctgcctgttgctgccgcactgttcctgcccaccccagaaaagattctccactgtctctgtttctttacaccagtctggggcaattacatctgatttgctgagcataggtcccatgtcccatgctggaggtaagcgaggctagaaggcaggcgactggagttgttagtgtctgtaatggaggcagcctctgactcccaccaaaactcatcagcgagacactttcgaaacaaaacaggagagcttcagaggctgggaaagtgtcttagatcttttgggcttctataacgagacaccaaaaactgggtggattacaaacaacagacatttattcctcatagtcctggaggctgggaagtctaagagcaaggcaccagcatatcccgtgtctggtgagggcccacttcctggttcataaatggcaccttctcgctgtgtcctcgcacgtagaaggggcaagggatttctgtggggcctcttttataaggacactaatctcattcatgagggctcccccttcatgacctgatcacctcccaaatgccttctctcctaatgccatcaccttacagattagaattgcaacataggaatttagggggacgcaaacattcagttcactgcagcagccaaaagcaaagttactaccaagagacctctgccagacccaggggattgatgagacatcttggtacaggaaagagaaggcattcctcatccaggaggacgaggactgtggcaggaccctcagagacctgcaggatggccctaagggtggtgggagaggtgcacgggtctaatccaggattcatatatagatatattcatatatatattcatatagatatgaatatatctatatgaatatctatatatgaatatatatatgaatatctatacatgaatatctatatgaatatctatatatgaatatctatatgaatatctatatatgaatatctatgaatatctatatatgaatatctatatgaatatacatgaatatatgaatatatatgaatatatgaatatctatatgaatatatatgaatatctatgaatatctatatgaattatatatgaatatctatatgaatatatatatgaattatatatgaatttatatatgaatatatatatgaatatatatatgaattatatatgaatatatatatgaatatatatatgaatatatatgaatatatatatgaatatatatatgaatatatatatgaatatatatatgaatatatatatgaatatatatatgaatatatatgaatatatatatgaatatatatatgaatatatatgaatatatatatgaatatatatgaatatatatatgaattatatatgaatatatatatgaatatatatatgaatatatatgaatatatatatgaattatatatgaatatatatatgaatatatatatgaatatatatgaatatatatatgaattatatatgaatatatatatgaatatatatgaatatatatatgaattatatatgaatatatatatgaattatatatgaatatatatgtgtgtgtatatatatatatatatatatatatattttttttttttttttttttttttttttgagacagagtttctctctttttgcccaggctggagtggtgcaatggcgcgatcttggctcactgcaacctccgcctcctgggttcaagcgattctcctgcttcagcctcccaagtagctgggattacaggagcccaccaccacgcccagctaattttttgtatttttagtagagacggagtttcaccatgttggccaggatggtcttgatctcttcacctcatgatccacccacctcggcctcccaaagtgctgggattacaggcatgagccaccgcgcccggcccagggttcatattaagaaccaagttctgggagacactgaggcccccaggggttctggagtcagcactaaaccaggcagccctcaggtgaggtctgagagcatctcagaagcttccagaccctcttggaacccggcccaccctgcatctcacttccttttggtgactcgttgctctgtttggcctcattggccctttcctaaagccatccagtaaacctccaggtgcctggtgggtttgtcaaggtgtttccccataggttcctgtgcttctagtgggggtaggtatcaaagtggccgcagcagccttactggcctggtatgcaggagcgagagcagctggggcaggggagacccgggggtctacccttggccagctgtggcggtctcattaatagagtgtggcctggaggtgagcgggatgaggaagtcacatttactgcagcaccagctattgcacggttattccgtgcctgatgttaagtgcttgactccgttgctccatcaaaccttcagcacaactcctctctaagcagaggattgtcattacccatgtcttccaaaagaagctcaattattcgccccacatcacccggtagtcggtcaaaaagccaggattcaaacctaggcttgtctgattcccaagcatacatccctcccaccaggccagcaccaggggccagaggggtataggcctgggccagaccatgctgggggccactaccctgagggcaccttgagagggaaggaggaggccccaggacaccctccaaggggacttccccctcctccttagcatgttccaggcctcttccaggaaagccctgaagggcctgcatccccctgtggcgaggaaagggaggtggctagactcgcagggctggggtccacgggtaacaggctgtggagtcgtttgagacaaatgcttgaactggctctttccttgtgaggttttcgagtctctaagggtggggtgaaagaccactccaaggctgcagctgcccacagctggctgtgctgatgagactgctcaggccccctgactctctgcccctaatcccagtggctgcaaactcagccccaaactggcaggccacctggcaggaggcccctggacagagcagaccagggccccgcaggctccagcacctgctctgcccctcctccccagactcgtctcggtccccaagcctcaatccccaattctggatggagaccacaggtttagcagtcaagaaagttctgaaataagcatgaatcgctttcataatggaactggggtggggtgggttaaatgacactacatgaataagttaaaggcactgaagatctcgtgcaaggaggaaccatctcccccagtgtactgtgagccccccagggccagggaccctgttctgctcgcctccaggtgtccccctcagtgtgaggcagagtcgggcacatggctgcacaaaagctgtttgctggttgtccggtgcctagaataatgactggcgcatcggaggcattcaatgcatatttgttggctaaatgaatataagtaggttgcatattttgtcttgggataatgtgtgacatctttttctgcctccccttagaggactccccatgtactcgcctccagtccaccaggcccttacctctcctgcagtctcatctccccaatcctgggtgtctcctgccaggccgctgctaagctctgcccagtcatggttacctccccacctccccagctgcaaggaggattcatccggcaaccagttgaggctagattctcagcagctttattgaatattgagaggtggtctcacctcccactggacatgtgtcctcaagttcataccagaacttctttgggacagacagacagacaggtggcagggcagggcaggtgtccacgagggtggggccagtgcaccaggggcagctcagctctccaaaggggccagcatctgcacctgctcctgctgctgctcctgctgctgttcctgctgttgctccagctcagggagggagagagtcttgtcctggctctctttctccttgaaggtgctgaagaaggagttgaccttgtccctcaggtccttctccaggaagctcaagtggccttccacgtcccccgcatgggggcccagtttctgcctgagctgttccatctgctgcaccagggctttgttgaagttttccccgtagggctccacccggcgtcggaactcctccacctgctggtccaggtgcccacccagctctgccagtgacttctgcagcccctcggtgttgcccctcaggttgccacgcacgtcctcggccaagggcgccagcctctgccgcagctcctcggcactggccgagatcctggccttgagctcctcggcgttcttcttcatctggaaggtcaggccctcaagctggtggttgagcttctcctgcgtgtcctgagcatagggagccaggctgcggcgcagctcctccacggtctggtcaatcttgactttgaattcgtcagcgtagggcgtaaggcgtcccttgagctcctccacgttctggtcgatcttggccttgagctcgtcggcgtggggcctcagcgaggcctgcaggctgtcggcgttctcccgcagcactctctccatgcgctgtgcgtagggggtcagctggcgccgcagctgctcggcctgcgtgttgacctgggtgcgcagctggtccgcgtagggctccaggcgctgctgaagctctcgcaggttgtccccgatcttctggctcacctcattggcatggggcagcagccgggccctcagctcctccagctccttcccaatctcctccttcagtttctccgagtccttggccaggcgttcatgcagctcggtggcaaagggcaccagcttcttctgcaggtcacctgcgtaagtgttcacttctccaagtttgtcctggaagagggcactgtggggaagggcacaaggaggccacgttacatttggcatttacacggcaagactttgtctgcttgtataccactcgccttatgcacacgtgctaagacaggtgagtgctcagaggtaccgagttcaccctccctatggtggtgcagattggagaggatgggtgtcacagactaagttacgatgctgaatttctatctcaggatctcccacatagtttgtctcagaatctacccaccatgtcacctccagcagtttgctttcccctccttgtctgcagagggtgggactttgaggtccttcccagagggagtgttctgggccataggatcacattgtgtaacacaatgttgtcttcttgacctctgctggggtcttccagtggcacaaggtgctgctttccttgcctgtgcccaggggcctcccaaatattcccacctccctccccttgattccactggggcctgtctttctgaaacgtattagaaatcagctcacatgacattttcctccctccctctcttccatgagcctgaatgataggatgtggccatttgtcaaactctagaacgtcaaagcaaaaggacatggcagggattattcggtccaaacttccagtttacatatgtggatcctaggttcagaggcccggccagttagtggcagggcagtgggtatcctaagctcagggctcctgtctctaagctcaacccttgccagtacattgcatggcctttaagaattccccgtcaccaccgcacactgtagtccctcttacttgagttgctgggtgagttcagatttctggagatgttccacggcctccttggcattgttgctcagctggctgaagtagtcccacatcactgtggccacctggtcagcactgacctcagccctggctcctgggtggtaacagagagcaattcatgaggccccgtctcctgtgtggcccctctgctccagctctgagctgcagactggatgatggtgggggtgcctcaacctgccattttccctgtctgagcttagctttttggaagccacagggatatgtgaaactggtatagcaccaatgccaatgggcccaccactgggactgggccagctctcctgtgagccacttggcagccaggcagacctcatgtccagctgggggctgatgggcactcagaagtgtccttttgctttggctcagcctccatcctgcactactcagagcagcagcccaggagtgccatccaaagacagcttctactcaccggcgacagccaccagggccagggtcaggaccacggccttcaggaacatcctgagctgcttgctgggctggaggagtttcttgccacactggatcctccctacaatcaggggagctgacagagaggtcctcaggagagctcacctgcgctgcagtgggaactgactgaagctcagagccagccagacatttaaactctctccctatcgccacccccctggctgccctcccctcctccttcctcagtgtgactccacgctggaaggtgacacattcccaagaggcctcttggacttttgtgaccctgagactacgtggaagctgacagcagatcagggctcaagcgatagttagaagtggtggctgttccgtgcgtgggcacccccacccccaccccaccaacctcagcatggaagggaggaggggaacggaaaacagtaggagaaacacctgagggagcccatgagcccgggactgatgcctcgaggccctgctggcggctctgggtttgtgccgggctcatggggggcaaagtccacatctcctctgtctaccccagtgaagacaggtccccccagtctccacatccgccactaatgctgactccatctcagagcaccagacactggagtgggaccatccaggactgcagacagcatagtgagctaaaatctaggtctcttgtcaaggtacacccaagaggagggggccctggagagcctttgggcagatgggtgtgggagacagggccttgtcctgaaagggttaattgtagagtgcttcatgtcccactcccatgctgtgcctccttggtctagttattcaaagccctgagcttcagtttctcctctgaacaatgggatggttcagtacattaaagaagacattgcttgcgaagtgggtagtacggtcatctctcagtctccatgggaaattgattccaggaccctctgcagataccaaaatccatggatgttcaagtccttgatataaaatggcatagtatttacatataacctaagcacagcctcccacatactttaaatctctagattacttataatacctaatacgacggaagtgctgtgtgaatggttgttatactgtattgtttaggaggtaatcaccaaaaaagtctgtatatgtttagtacaggtgcaattttttttttttttgagatggagtcttactctgtcacccaggctggagtgcagtggcacgatcttagctcactgcaatctctgccccccaggttcaagtgattctcctgcctcagcctcctgagtagctgggattacaggcacccaccaccacgcccagctaatttgtgtatttacagcagagacggggtttcaccatgttgctcaggctggtctccaactcctggcctcaagcaatcctcccatgtgggcctcccaaagtgctgggcttataggcgtgagccactgcgccctgcccagatgcaatttttttaaaacattgtttttaatggagatggggtgtcgctatgttgctcaggctggtctccaactcctggccttaagtgatcctccaatctctgcctcctaaaatgctgggcttacaggcatgagccactgcacccggcccacagatgcaatttaaaaaaaaaaaaaaaaaatatatatatatatatatattttttttttttttttgagatggagtcttgctctgtcacccaggctggagtgcagtggcacgatctcggctcactgcaagctctgcctcccgggttcacgccattctcctgcctcagcctcccaagtagctgggaccataggcgcccgccaccacgcccggctaatttttttttttttttttgtatttttagtagagatggggtttcgccgtgttagccaggatggtctcgatctcctgacctcgtgatccgcccgcctcagcctcccaaagtgctgagattacaggcgtgagccaccacgcccggcctaaaaaattattttcaatccaaggttggttgaatccatggacacagaaaccaaggatacagagggctgcctatagagctcctggcacagagtaagctctgaaaaatagttgctgttattataataatcatactgtataataatcatactgtgttcctgatttggagcaaagcagggagggtagcagagtgctccctcctctagtgagagtggcagaatgagactcagccctctgaggggcgccaggtgggccagaggcagggtgatgggtgggaccagcctgaggcctgactcctgcccttcttgccccccagccacactccctgggcaggagcagctggcttgagcagaatcttgggacctgaggctctcaggggacctcccattgggggatggagggcaatggtggtggtgcccaggaggtcttctacttagatgtctattggatctctaaatgaggctgcatgcataatcacacacaaacatccactgagaaggtgacacaccacgtcagcatgggtccctctgccggaccacaccactcctagtgactatgaggtgacatccaggcacgttgcactattggctcctgtcggtgagtgcagtgcctgacaacagtgagctacatttatttgtaaaaatgaacgccatcagagtagaccacaattgtactaactctaatttgctttgtgttcattttttcagtttccagaagtggcttaatgtttcctagggtcaaaggcagtcaaatgacctcctgactctggcaccccttctgctgggtccccactgccctgtagtggtccccacgctaccatgctgcctcctttttgatgcagcctgtgccatctctctgtgattgttggggtcagatgctggagtccactccctggcttggcatccaggctccaacacgtactgcctgtgtgtccttgggcaagtctcataacctctctgagcctcagttaccttggtgagacataaccattgtacctgcctcctaggctgtgaggattcactgagatgatcttatagtgcttgcaacaatgtctggcacatagtaaaagtgatcactaaatgttagccacgtcttacccctgcaaggctcacctccctggaacccatcggtcccaaccctgctcctgaatcaggcacagtccagcttgcagcgggagcaaaggtcagtactcagtgcccctgtcccttccccaggccagaggggaggaggagactgagtcacgaatgacacctcagccgcagtttgacctccaggacttacagtcctagcagcaggtgccactagcatgtgagaggtccagaggcgcttctgtctcacccgcccgcctgggtgcacccatgctgggagcgcctgcaccatttgagcatgtccgagagcatccaccagagtgtgtgtggattcacagaagtgtgcaaatcactaagaaccaagggactggcacagcccatgcgtgcacccacgctcgcgaggggacctcctgcctttcaacgtggcggggatgtgacctgttaatgaatgtatttacttcccaaagtctgagggtacgttttgcatcaatctgtagatggatttgttttggggagcagggagagaatgagagccccctgtgctcagtcttagagggtgcaagtagctgatgggaagagcagactgccttccagccaggcctggtcctgtgagtcagggacgtccaccttagtgggcatgaaaggcctgtgtgatctcgagggagacatcgcctctccaagcctctccttatctgtgcaacaggcagacttaatgattggtgaggcaatgaggctgatagctcagcattagctacagccacccctcctggccaaccacacagggatcaaaccaggggtcagtccagaggtcagagtcaggagcagaaaactcagatccagccagggacaggcaggtcacacggacatgtgcctcacgtatgcttcaaggggccctcccccgggcagaactgaaggacagctcctgttgccataggaaggagctgggtgagatactaggaggaacttccggcatgatgatgtgtgatgaacaagggcctctggccaacaggtctgaatcagggctgcccagcccagcctggtgggaagggcatggagcatgggggctcatgtactaaacctcacctggacacaaggtgaaacagcccaaccccagaggaccatttttggccccggatggtcaaatcccctcttcctcccatctaccactggcttctccctggagcagtcttcatcccaggggagccatgatgggagagaggggcagcgcaggctggccaccaagagatcccctgccggggtgcaggttggactgttggtgaggggccacaggtattctcaggtaccaagcccttggaaggagacaaggtaccaggcttcctggaggtgtgctacatctagctcagcaccctgccaggtctctctacccacatgtcctgacctccctgggtccgttgccatgcgggagagagaggccaggctcctccagaccctctgcagagatggaaaggcttggagggtctggggccacgggaccccgccagcccattctagcacacccgggcccatagaccttgttgcctgcccctgcctggatctgggtccccactgtgcctttgcctctggggctatggagcaggccgcagcagaagaggaaagggcatccccaataccaaatcctccagtgaccacttcttcaccttctaccccaccaccaaagtctgcaggagacttgagacaggtttgttctgggcgtgtgactgatgcctctataggggtctcagtgctctaagccgtctggtatttgcctggggtgtgtgaagacctggattaaggttcccagccttactactaatgggctgtgcacttggagcccttagagccttaggtttctaacctataaaatggacttaacgtctacttcacagggttctatttgcattttaacagaaaacaaagtcttaagtcaaaggaatgaatctctctctctctctctctctctctcttttttagaccaagtctagctctgtcactggagtgcaatggtgcgatctctgctcactgcaacctccacctccggggttcaagcaattctcgtgcctcagcctcctgagtagctgggactacaggcgtgcatcaccatgctcggctaattttttgtatttttagtagagactgggtttcgccatgttgcccaggctggtctcgaactcctggcctcagatatccgtccgtcccagcctcccaaagtgctgggattacaggcatgagccactgtgcccagccaggaatggatcgctaatagaggaattccaagtctcacccaccgataaagaattctgagggcagagccgggccactttctcaggcctctgatttcatactgtggtgttagttacttctgagaggacagcttgctgccagagctctattttttatgttagaggctccttctgcctgcagactctgctgtctgggaagggcacagcgttaggagggagagggaggtgtgagtccctccgtggacccgctgctttgtacttctctatctcatttccttttcagcaccactctgggaaatcagtattccagccccattttatcctcagaaaattgaggctctgagatgttatctctgtgacctgggtcctattacgtgccaaaggcatcatttaagcctaagatgtcctggctccaaggtgtcagcatctggaagacaggcgccctcatcctgccatccctgctgcggcttcactgtgggcccaggggacatctcagccccgagaagggtcagcggcccctcctggaccaccgactccccgcagaactcctctgtgccctctcctcaccagaccttgttcctcccagttgctcccacagccagggggcagtgagggctgctcttcccccagccccactgaggaacccaggaaggtgaacgagagaatcagtcctggtgggggctggggagggccccagacatgagaccagctcctcccccaggggatgttatcagtgggtccagagggcaaaatagggagcctggtggagggaggggcaaaggcctcgggctctgagcggccttggcccttctccaccaacccctgccctacactaagggggaggcagcggggggcacacagggtgggggcgggtggggggctgctgggtgagcagcactcgcctgcctggattgaaacccagagatggaggtgctgggaggggctgtgagagctcagccctgtaaccaggccttgccggagccactgatgcctggtcttctgtgcctttactccaaacaccccccagcccaagccacccacttgttctcaagtctgaagaagcccctcacccctctactccaggctgtgttcagggcttggggctggtggagggaggggcctgaaattccagtgtgaaaggctgagatgggcccgaggcccctggcctatgtccaagccatttcccctctcaccagcctctccctggggagccagtcagctaggaaggaatgagggctccccaggcccacccccagttcctgagctcatctgggctgcagggctggcgggacagcagcgtggactcagtctcctagggatttcccaactctcccgcccgcttgctgcatctggacaccctgcctcaggccctcatctccactggtcagcaggtgacctttgcccagcgccctgggtcctcagtgcctgctgccctggagatgatataaaacaggtcagaaccctcctgcctgtctgctcagttcatccctagaggcagctgctccaggtaatgccctctggggaggggaaagaggaggggaggaggatgaagaggggcaagaggagctccctgcccagcccagccagcaagcctggagaagcacttgctagagctaaggaagcctcggagctggacgggtgccccccacccctcatcataacctgaagaacatggaggcccgggaggggtgtcacttgcccaaagctacatagggggtggggctggaagtggctccaagtgcaggttcccccctcattcttcaggcttagggctggaggaagccttagacagcccagtcctaccccagacagggaaactgaggcctggagagggccagaaatcacccaaagacacacagcatgttggctggactggacggagatcagtccagaccgcaggtgccttgatgttcagtctggtgggttttctgctccatcccacccacctccctttgggcctcgatccctcgcccctcaccagtcccccttctgagagcccgtattagcagggagccggcccctactccttctggcagacccagctaaggttctaccttaggggccacgccacctccccagggaggggtccagaggcatggggacctggggtgcccctcacaggacacttccttgcaggaacagaggtgccatgcagccccgggtactccttgttgttgccctcctggcgctcctggcctctgcccgtaagcacttggtgggactgggctgggggcagggtggaggcaacttggggatcccagtcccaatgggtggtcaagcaggagcccagggctcgtccataggccgatccaccccactcagccctgctctttcctcaggagcttcagaggccgaggatgcctcccttctcagcttcatgcagggctacatgaagcacgccaccaagaccgccaaggatgcactgagcagcgtgcaggagtcccaggtggcccagcaggccaggtacacccgctggcctccctccccatcccccctgccagctgcctccattcccacccacccctgccctggtgagatcccaacaatggaatggaggtgctccagcctcccctgggcctgtgcctcttcagcctcctctttcctcacagggcctttgtcaggctgctgcgggagagatgacagagttgagactgcattcctcccaggtccctcctttctccccagagcagtcctagggcgcgccgttttagccctcatttccattttcctttcctttccctttctttccctttctatttctttctttctttctttctttctttctttctttctttctttctttctttctttctttctttctttcctttctttctttcttttcttctttctttctttcctttctttctctttctttctttctttctttcctttttctttctttccctctcttcctttctctctttctttcttcttcttttttttttaatggagtctccctctgtcacccaggctggagtgcagtggtgccatctcggctcactgcaacctccgtctcccgggttcaacccattctcctgcctcagcctcccaagtagctgggattacaggcacgcgccaccacacccagctaatttttgtatttttagcagagatggggtttcaccatgttggccaggttggtcttgaattcctgacctcaggggatcctcctgcctcggcctcccaaagcgctgggattacaggcatgagccactgcgcctggccccattttccttttctgaaggtctggctagagcagtggtcctcagcctttttggcaccagggaccagttttgtggtggacaatttttccatgggccagcggggatggttttgggatgaagctgttccacctcagatcatcaggcattagattctcataaggagccctccacctagatccctggcatgtgcagttcacaacagggttcacactcctatgagaatgtaaggccacttgatctgacaggaggcggagctcaggcggtattgctcactcacccaccactcacttcgtgctgtgcagcccggctcctaacagtccatggaccagtacctatctatgacttgggggttggggacccctgggctaggggtttgccttgggaggccccacctgacctaattcaagcccgtgagtgcttctgctttgttctaagacctggggccagtgtgagcagaagtgtgtccttcctctcccatcctgcccctgcccatcagtactctcctctcccctactcccttctccacctcaccctgactggcattagctggcatagcagaggtgttcataaacattcttagtccccagaaccggctttggggtaggtgttattttctcactttgcagatgagaaaattgaggctcagagcgattaggtgacctgccccagatcacacaactaatcaatcctccaatgactttccaaatgagaggctgcctccctctgtcctaccctgctcagagccaccaggttgtgcaactccaggcggtgctgtttgcacagaaaacaatgacagccttgacctttcacatctccccaccctgtcactttgtgcctcaggcccaggggcataaacatctgaggtgacctggagatggcagggtttgacttgtgctggggttcctgcaaggatatctcttctcccagggtggcagctgtgggggattcctgcctgaggtctcagggctgtcgtccagtgaagttgagagggtggtgtggtcctgactggtgtcgtccagtggggacatgggtgtgggtcccatggttgcctacagaggagttctcatgccctgctctgttgcttcccctgactgatttaggggctgggtgaccgatggcttcagttccctgaaagactactggagcaccgttaaggacaagttctctgagttctgggatttggaccctgaggtcagaccaacttcagccgtggctgcctgagacctcaataccccaagtccacctgcctatccatcctgccagctccttgggtcctgcaatctccagggctgcccctgtaggttgcttaaaagggacagtattctcagtgctctcctaccccacctcatgcctggcccccctccaggcatgctggcctcccaataaagctggacaagaagctgctatgagtgggccgtcgcaagtgtgccatctgtgtctgggcatgggaaagggccgaggctgttctgtgggtgggcactggacagactccaggtcaggcaggcatggaggccagcgctctatccaccttctggtagctgggcagtctctgggcctcagtttcttcatctctaaggtaggaatcaccctccgtaccctgccttccttgacagctttgtgcggaaggtcaaacaggacaataagtttgctgatactttgataaactgttaggtgctgcacaacatgacttgagtgtgtgccccatgccagccactatgcctggcacttaagttgtcatcagagttgagactgtgtgtgtttactcaaaactgtggagctgacctcccctatccaggccacctagccctcttaggcgcacgtgaagggaggaggccggatgggctagaggttggagtaagatgcaacgaggcactattcttggctccaccacttgatatcagcctcagtttcttacatgtaaagtggatacaaccgtaccccctccaccgtaggtttgccgtgagattgaaatgagagagcgttcgaaccgtttggcacagcacctgcacgtaaagatgcttgatcaatgttgtcatgattacagttgagctgactgggcccttgggacccggactggagtggtggggggcagtgtcctgggaccaaaaagaagcacaaggtctcccaatagaggctgcttcctttgtgtccccaccacccgaaagatgtcaggtcagagagcccgagagctgcagatggcttgagtagggctccactcttcagatcaaaaaactgtggcccggagaggcgaaggcacttggccagcatcacagagccagcacgtggcagggccagaccttgagcccaggtcagctgcgtgtattctgctcagttggtgcagaaaacagttttgtcactcctatgtcaggtgttagggactcctttacagatctcagtggcatcagtacatccagccccacctggagactgctttctctctgaaaattccccagggcttctctctgggctgagagatctcagcacccgtatctagaaaatgttcccacccagacctggctggatgactgctgttgtagctctggaaggttaggaactaaaaagcccactcctttacctagggtagctaagatacactggagatggggacatggggatggggccgattatccaggggcctgcaagagggggcaaaaggccctgcagagagagggtagggaaggcactgcccagatctgtgaagccatgtgcgtgcacgcggggacattcagacatgagtgcaaggagggaccgtgagcagggaggtcatgtgagaatacacaggcatgcctgcacacccatgtgaacttgagtgccaggccacacactcttttttttttttttttttttttttagctggagtcttgctccgtcgcccaggctggagtgcagtggcatgatttcggctcactgtgacctctgcctcccaggttcaagcgattctcctgcctcagccttcctagtagctgggattacgggtgcaagccaccatgcccagctgattttttttgtatttttagtagagacagggtttcaccatattggccaggctggtctcaaactcctggcctgaagtgatacgcccacctcagcctcccaaagtgctgggattacaggcttgagccaccgcacccgacccgcgcactcttttcaataatcatggatggccaggggtgcagggtctaaaaagcgctgcctagcccatcctgctgttcactgggcaagcgacgtcacaggtccaggcttcagtgtcctcatccatgctctgcgtctgatggcaatctagccaggatgtggggaagggaggatgcagtgagagcacagatatgagagcatcttggaaataaaaatgtacctgcaagaggtggtggtgaattttcttactcaggccagcttctgccagggctggcagaaagagggggtggcatggcatggagccgcagggggtggaggactggcttccactgctgtgcctgaggaagccgcggctgtttctgggcgggatgggagtagtgggagggggatactggccttgtgagaagaaaagggaagtgtctgtttgagaggtttttgaattagtaaaggaggacaggcgcaaactccaagcgcttcacttgcacccgggaccaaaccccaatcccagtggctggctccctgaggccgccccgctccgtcccgccccgctgacagcggctgggctggagaaggctctatacggacacacctctggggacggggaacccactgctcccagctaaagcaaccctgtttcctggcccgcctcagacagggctgcaggccttgtttgagcccctttcagggcacctggccttggattgtctgtggctttgcctggtccgctgtgacttcctttctacttgagccttgctaaggcagactctactccctcactcgtaagcagccaggcgtccagcaggtcctccaacgtcgatcttggccctaagacgtcctgtctgggcacggagttgttgagatccggcaggaagtccctgctccagggccaaaggccccacccgggctcccccggatgtccccgcacccccctctattctcccaaaagaaagaagctgcttcccactttggaaacgtttattctgagcaccgggaaggggggcggcggcgggcgcctcactgggtgttgagcttcttagtgtactcctcgagagcgctcaggaagctgaccttgaagctctccagcacgggcagcaggccttggcggaggtcctcgagcgcgggcttggccttctcgctgagcgtgctcagatgctcggtggccttggcgtggtactcggccagtctggcgccgccgttctccttgagagcctcaaggcgcgcggccaagcgctggcgcagctcgtcgctgtagggggccaaatgcgtgcgcagcgcgtccacatgggcgcgcgcgcggtcgcgcatctcctcgcccagtgggctcagcttctcttgcagctcgtgcagcttctggcgcgcgccctcttggagctctgcgcgcagcggctccaccttctggcggtagagctccatctcctcctgccacttcttctggaagtcgtccaggtagggctgcaccttggccttcacctcctccagatccttgctcatctcctgcctcaggccctctgtctccttttccaggttatcccagaactcctgggtcacagggccgagctgttcgcgcagcttgctgaaggtggaggtcacgctgtcccagttgtcaaggagctttaggctggagggtgagacagaagggttgagggctggcctcccagcgccccagcctatcaggggtgagccctgggtgacacctgtccgcggaggtgcagtggcctagcatttccagtacactctcaaccaacacccctgccccgccaggccatgccccgttgtgcagctggaccgaggcacagagaggagctaaaaaggagacagagctgggactggtgcccagttacgttggtctccaaagtgggcccttgaaggacctcgcttctatgcctccagcgcattctcctctccgaagacagcccacagtcttgctgggcaggagcagaggaggtggtgaagaagggaaaggggcttgctacacttgcaggcacaatgtggctctgtgatcacgcatcgggcagccctggtctgtcctttgcaggggacatgggctgtgaccctgcctggagatcccattccggtttctccatccagaccatctgtggggcccagctcatcagatattaggtgaggactcggccagtctggcttcaacatcatcccacaggcctctgccccctgcccctgccctcaaccccaggctgggtccttactttagctgttttcccaaggcggagccttcaaactgggacacatagtctctgccgctgtctttgagcacatccacgtacacagtggccaggtccttcactcgatcccaggggctctgggggggttcatcttgctgccagaaatgccgagcctggctccctgagggtgggaggggagacccagatcaggccagctgtgggctgagatctgagccgaaaggccaagcttggaggtgggggagagggggccagtgagaaacctgctgcctctgcccaggagggtgggccacggggatttagggagaaagccccccgatggttggctccctaggttaggggacacctacccgtcaggaagagcacggccaaggtcagcaccgcagctttcatcctgaagggccgtgggggacctggaggagaagaagggcctggctgagtggggtgccttcagcatgcagaagccccgtgctcccccactcattgcagccaggtgaggagaagggcacagagcgggagaagacctcaggtacccagaggcccggcctggggcaaggcctgaaccttgagctggggagccagagtgaccggggcaggcagcaggacgcacctccttctcgcagtctctaagcagccagctcttgcagggcctatttatgtctgcagccagggtctgggctgggaggctgataagcccagccccggccctgttgctgctcactggtcctggcaatgtggaacttaagagttcaaggatcagctctgtccctggggctgggcaaatagagtgggcaaacagcaagctgcgggggctgcagggcaggggtcaagggttcagtgggggcgggaggggagtgtctgcaggcttgcaggtctcccgggtggggtcggggttccctgcactcatccccttcccctccatgggagtgtgtgggcagttgccattgtccattgtgttggcagaggaggggaggggagggacgctgggactcctccaccaaggagactgcctcccccaccaccagcattccagggagactacttcactcccctcccccttcccccgccctgtcctcccaccagtgctcttctttagtccccagcaggtcctccaggcctctctccaagcctcccaaactggtaaacctggggagaggggagagccctccgtggctcccagactgaggtttcggagacctcttgcatttcaaaacactccagagatcaattcggagctgccaacttttaattttgtcatgtaaagatattgtccgcctccaaaaaaccctcaccatctacagtgaccatcacttcaaaaaggaaaggctttaacaaaaaagggcataatctcagaattacattacagaattgaagccccttagattgaagacgtctccctttgcattgttcacacttatatttgatcacgcacaggtgtgactggatctcagcccttgggaagccctggtgtggggagaagacctctgggcaaaggaagtggcaggagacctgctttctcatttcacttggcctccatcttgctggaggaagatcgtgggcaagttatataatctctctgagcctcggttttctatctgcaaaatggggcaagaatggtcagggttgttggaggcccctgagacagcctgtgaatgtaaagtgctgtgtgtccgttggtgtttgcagcaccatcttgtcaggtttctcctggaaggcccagacctcccccagcaggttactgataggacctgagtcctagagcctgtgatgcaggctgagaggaactgtgacatcactccagcctctccccatgccaccatctcacagatgaagagactgaagagcacagagggactttgcccagaggctgtcatctctcagggagttagaagaaaggctggacctagaacccagtctctggacttgggatgcagggcagaaatgtaccctgtaccatcactccaggaaactccctaacactagaaaccaggctgacatctctgtttaccagatcagggagtggtcggcctcatgcctttcacttcagagaagattctggagccagaaaacctcaaatctaagggtcaggcaggttcaaatccagctgcctgaccctggatgagttatgatacatcacctccccacacatcagtttctgattgaagataatgatagaatatgccatcgccctgagttatggcaggggttactgtgtggcaagcagaataacgctccccaaagatgtccacagcctcatccctggaacctgtggctttgctaccttccatggcaaaaaaagattttgctagtgtgattaaggacctggagatggggtggttggcctggattctccaggtgggcccattgtcatcacaggggtccttaattatacaagagggaggcagtggcctcagagtcagagaaagagatgtgaggatggcagtggagatcagactcgtgactgctggaagggggccatgagctgagggacatgagcaacccttccctagaagctggagaaggcaaagtatttttccctgcagcctccaggagcacagctctgctgccaccatgattttagcccagtatgacccattttggacttctgtcctccataactgtaagataataaatttgtatcgttttaagcatgaactttgaacatatatgcaaaactgttagaaaggtacctagcacttagtaaacagtaactattctgttttctagaatcccagtttctggtaatgtattcccttattcccactacacttgctttatcagatctgagacctcagcttctgcagcaggcatgaaggcagcagtcccacatctctctgcttgtccttgacttgcagttgctgagatatggaacatcttttctaggactgaagtggccccagatgtctatgggactgtgtagacagggaggtggccttggtgagccatcagcctgggctgcctacttgaccatcccagctgtctgtagctttagaaagtgggaaggtggctggtcccctgctgggacagctcacaggtgtctcgggccaagagagcgtcttttcttttggggggtagagtttgtcccagtcagcacatgggggaatctcagaagcttactggttggactccaagatacttgccagtgtttcacccttctctttggtttgttactaaaatgattgttatggctaaacctagtatttaacatttgcgcagttctttgtggccaaagcactttcacaacttagaatatccctataaggctggaggccagattttacccttgtgatttttgcctgtgggaaaactgcagctcacagctgccctgcatccttcagcggttactatttagcgctggcaggggtgggaatcgggaggcctggcttctagttctttgagggtggccttgcacccttgcggagcctgcagcctttgcagtctgatcagggacttctcagtttcctggctcagggactgcgaggcatcaggatagggggtgctgttgaacagcatcttaccaagcaggcagtttccttttctaaatatacttattcaccagggtggctactccattttattgcaaggtatttggcttaaactagtctaagccccctttactaatattttggaaaggaaggaggtctttctggacagagctgatggaaaaatacataacaacaacaacgacaataacaaactgggttgatgacacactcagactcagggtccagccaggcattgttcaaggcactcagtggccacgggttggactgtttggtggctgcggggcccacagtgtaggcccctgtttccacccatttctttccctcgtcttgggagtctccagagcgactgctcctgaacagggttaccaagtcctggccctggatgccctgacatgtgtaggagtgttggcggtgaccgcaagagtggattttgcacagaaagattagcaactcctttcacaatttatgtccaaacatactggtccatctgtatcgggaggactctgtcccctgctaggtctggcacataacagacacctgccaaacatctgctcagtgaatggcactggcaccctagagggagggtcaccagcctggtcatagggaggagtgggtcctgggaggggaggcagtctcataccagcccctgctcagaacgtttcttctgggagcacgtggtatgagccagaatgagagttagggaggggaggtggtgactgagcaggggagacaggacccccacccccagtagttcctatttttggcaattttgctgcagcttttgtgatagagccccaagttagacccttgggtggggcaccgtagccagctatgcaagattctctcctgccctcctgcttggaaaagactaaggccaggacagagctcatctttgatcagcaggagggaagcacagtagccctctgagttcttgatctttgcagttggggtggggtgggggctggcacaaagtcagaaagaaaactgtgtagagcacggttttctgtcaacatggctcctgttttctggagctaagctctccagtctgtatccaggagccagtgccctgcttcctacaaaagctcaccctacctctggtccaaaggcaccctggctgattttaggagggagtggcacctattgcaacaggtgctacaatttgctggaaggcatctgggtattatcactgtttgattctagagactcacctagtcttgcatgacagtgtatacagactcagaggagttttagaaggcccttcttgagaaggctcttttcttctctaatctaaatggccctacagcaactttctagccgccctcatggacttgaaatctttcttttctctttgcaggagtgcagtggtgcgatcacagctcactgcagcctcaaactcctaggctcacatgatccttcagcctcagcctcagcctcctgagcagctgggactacaggcatgtgccaccaagcctggttattttttgtagaggtgggggtcttgctatgttgcccaggttggactccaactcctgggtttacctaattctcctgcctcagcctcctgagcagctgggattacaggcgcacgccaccatgcccagcttggaaggctttctaaattccctcctctcattcttccttctgtgaactcagatggtctttccagcttcagtaagctttcttcatagaagaccttcaaccacctgtctcttagccatgcctggaaacttgctggaaactctaccctgccctttggagttcaggtgtgggataaaggagaaaactataggaaaattccacccccgctccgcttttttttttttttttttttttttttttttttttttgagatgtagtatcccgctgtcacccaggctagagtgcagtggtgcaatcttggcttgctgcagtaacctctgcctcctgggttcaagccattctcctgtctcagcctcctgagtagcagggactacaggcacctgccaccacacctggctaatttttgtatttttagtagacacggggttttgccacattggccaggctggtctcaaactcctgacctcagatgatccacccccatcggcctccagaagtgctggatttacaggcgtgagccatgccaggcccctccctttctttccaaatacttatttggctatcctttcactcggccaatgggggtcacgtcatgaagggtccagcctgtgtccactctttaaggatccttccctgtactcttcaaaagtgccctttcaaggaagctgttttccacctggcccagcaaattcaaatgctcccttctgacagggcagagtccgagctgggtgcccagggacacagtgtgaagcagagttcaggcttctagagaatgcgagtttcttaagtcactcaaagccccacccttagcctgggagacctctccagcctccactgctccagctcccacctacctgaggcttcttccaactagactccaaaccacaggcaaataatctatcagcctaagaacacaatcaggctcctatctacacaacttcctgctgtccaactaagtaaccaagttgtaagtaagtgcctcacaaaaggaaggacaaaaggcaggacaaaaggtcgtagcaacttgagtctggagattttttttttaatcctttttagttcaacataaaatgagaaagaaaaaaatatttctgacattttcaaagaacagaaataggaaagtatgttcatatacattcaacgtatactgcacatattggttactacaatacaaagcaatgagttttttttaaagtgtagtttgcaagatggcacggttagtaggctcactggctttcatctgttgttgctggagggtgcagtctgctctcccatacatacagtaccatgtaaacacatcaggctgagcgcgtggtggtggtagggcaggttgggggcataagagttggaacaagcgcagataagtcaacagctttttagggctttcttggtaagcccccttctggtgagtagttggtgaccccaccaagtggaggggagactggggaccatggaaacatgggacagctcccacgaagggctcttgcactgcagaattccactcaagggatcttgggtccaggagccgagctgccagtatcagtggagaaggacaaggtgcatggggatcccgccagcaacatcaggatggccatgccgggcacccgctttcctctgtgcaaattcaggatgaaagactaggaggggactcgggacctcttgctctcctttcccagaaaaaaaaagggtggaagagtcagtgtattcaaggtctctctcttgttttgaagatcagaaggagataacccagaccctctctcagccccagccagcagagaagactttggtttctaacaatgaagagaaataaagataacacaaataatagctactgcgtatgcactgcttcaactggggaaaggagaccactgcatctgtcactggcacaagtaagagctgttcacaattacaatgcctaaaggaaatactttgaacaaaaggtgcaagtcacaattcaaatagaacagaatctggttaaacatttctcatttaaacaaaaattccttttctctttatttattaataatgataataacaataatatcaacatttaccaaaaacaatttctacatgatcaagaattaaaatataggggctgagggtacccagtggggaagaggaggttaggagagaggcagggcccaaggcaacctcctacacttcttccctgtgacaaagaggctgaaagaggagagcatatatatatatattttatatatatattatatatataatatatatatataatatatatacacatatattatattatatatatacacatatataatatatatatggagaaacaatcctttttatagcacaatataaaatgagaatgaaagatgccatagaaagcatagtgcactgctgttgggtgttcagtccatggataaaaccagcaggatgataaaggcaaccaactttccaggttacaagaggggagctgagttatccaccaaaagcaaaggctcaaattgagacatcctaactggcaaaccatctatgccaggtcattctcagcctccgtgccaaactcttcatatgatcttggctgggacagacatgttttccgtggatcccagcagtaaagacctctctgcgttccaggcttgggggtttctctttttttgttctttttgttttctaagtgccagaagccgtcacccttcctctctccctttgcctgccattaggattccagaggatggcatcctttagtatttgctttcacagaagagcaatgcagggggatggagggtgctctgctgatgaaggctagggagggagtggccctgaggccgctggcctctgaactctaactgctttgctctcctgtttcaaaaaaggaacgaaagaaaaaaaagaaaggaagaaaaaaaaagaaagtatatcacctctggaagaaaacataccaaaaacaaaacaaaacacaaacccccaaacaaaacaaaaaaccaccaactcaaatatactttcacaaaagatggagaacatggatttccttcctgtttatttccttggtgacttggtcatacaagcaaacatggcaaaaccctctcagaacccaaaagaacagcacacggatgaaccaaatgtgaggaaagcagctgtgatattttgggtggagagaaacacaagggcaatttggcacaacgctgctagatactgtgggtttacaatcaaccttttcattcccaagctgtacacaaaacctggaataaagcagacacagaggagaattagtttgaaaagagaaaggctcaaatattccatttaaaaccttttaaaaaatgcaacgggtttactttccctcaggtgttcaggtagcttgccatactgaggctctgatgtggatttgccaagtggcttccctttcatcaggcctcttctgtcaaggattttccagatacaaccaatggtgcctgctgtgtactctttgcattactccagccaaacaagccaatttccccattctttctaccatgggcctctcatcacacatttccctaatctggaatatcctgccacttgcttctgtatggccttaaaaaatatggctggacatattttcctgccaggttttgtcttttaggactgagtttaaggacttcctcctttcctcattatgctgaccggaggtcacctgcatcctctggagccgtagctcacttctgtcgctatgaaggctagagcacctgtaacacacggcgagtcttgtgtcttattcccataaccaaaccaagagactgtgtttagcatttcttctgcacacccccacccctacctcgcgccctaaaactagcagcgtcgttaatgaaaagcaagaaactgtgaaggccacgaggggaggcgtggtactgtcgactgcactggccaccacaacacatgggctgaagctcctgatgggattgggagcaggcactgggccacagggctggtttggctctggccagggtgacactcactctctgtttcttgttacacgcctgcctgctccatgctgaaggagacttcggggtgcttgtagctgagcagaatgtctgtaatacacgtagatggatagcaagaggagtttaaatgctggctgccatcactcaggtctgggtgctcatgacctcccaggcttgccccacattctgcaagaccaaaaagaacgtatgaggttggcagggaactgggggactaggagagcaagggggagagagaggaggaattgaaggcaacctgtcgagcatcccacagcctgactcccagccctgaattctagctcacagcaggccctcaaggtgttgagtgacgatgggcgggggccaagattcttcctatattctcctctacctgttctgcttttttcccttttcctttaccctttcccatccttaggtaagatcaactactgtagtgtgagagaagatagaggactccttcagaaaggatcacctcttaaagagtgaaagggagaataattttactgcctgcaggcacccattcctgggcactgtctgtcttccagacactgtgctaagcacctgatactcactaagccagccagccctcagggcacaatgtaggataaaggctctatcgtttttgccactttacagatgaggatctcggggtccagaaagccaagtgcctcacctgcagagcctgaaaaggacagccttgggactggtggcagacctgccccgcccaaggcctacgcctattatttgttatgacaccctcccttgactggctccaagaagaggtagaaatgtgccattaggacctgatgccctctaagcagaactggaaaaagtgattgaaggcatatcatcacagagatgagagacaggaatgggagagccctgtgccatctggccagaagccacacctcctttacacacccacactcagggaagaccagtggggaaaggggctgtgtccagaacctgtgggatgctgtggctctacctccccatgagctcttcctacgaagagaggagcagttacggaagatggagggaggcccctccaggaacttctctggagtgccccatgcataaggctcctcaccctcattttccccatcctgaaactgctggctgcccatgagcgaagactgactgagaactgcatccgacatccgggcagagctaagtgctttcccagccacgagactcattcctggcaagttatccagctgtacctgcagaaaacagttaagagaagaaataagcacacaagacagcactctcaggcaacccctagagacagctggtccttctgaaggagcccaggcaaaagacagcccggggccccactccagactccttcctctaaagcaccacccaaagggggtgctccacagcgacagtgtgggaagctgcttggctctgcccagtcggggggctgagggtggggcggatgtggcaaatctcagctggtggtgacatcttgatacctacatggccttctaaaaccaggtttctgacctatccccatctccactgggactttgtcttaggacagcaccgtccagtcacactctgcagtgatggaaatgttctctgtcctgtccaatatggtaaccagtagccacaagtggctactgagcacttaaagtgtgactgggctgggcacggtggctcatgcctgtaatcccagcactttgggaggctgaggcgggtggatcatgaggtcaggagatcgagaccatcctggctaacacggtgaaaccccgtctctactaaaaatacgaaaaattagctgggctaaaaaaatttagctctactaaaaatacaaaaaattaggtggcgggcgcctgtagtcccagctactcgggaggttgaggcaggagaatggcgtgaacccgggaggcggagcttgcagtgagccgagattgcgccactgcactccaacctgggtgacagagcaagactctgtctcaaaaaataataataataaaaaataaagtgtaactggtgtgactgaggaactgaattttaaattgtttttaattttaattggtttagatttgaatagccacatgtggctagctactagactagcaccaccctaggaaaacaaaactttgctgaggcccaccagctcccctgatctgagtaagctcaatgtagctgctgaaaaataaccagaagcctatgggctcatttgctggggcctgagtttagactgagaagaggtttaataaccaaaactacagggaacagatggcaactatttctgattctttggtctaaaatttggagcatagattctacttgaattaaggtttggtctgttagggtgactcaaagaaaatgctcttaaggtaggcgaattgcctgagctcaggaattcgagaccagcctagccaacatggtaaaaccccatgcctactaaaaatacaaaaattagccaggtgtggtggcaggcacctgtagtcccagctactcaggaagctgaggcacaaaagtcacttgaactggggaggtagaagttgcagtgagctgatatcgcgccactgtcctcccgcctgggcgacagagtgagactccatctcaaaaaagaaaaaaaaagaaatgctccccaccgtttccagaaaggctgaatgctgactgaggagagcggccaagagaggctaccccacatcactatactctgtttcaaggctgggactgggaggatccacctctgtgcagcaggtgggaccaacatacataagcatcgtcgctgttctggatcgtgtggtgtctctggagggcccggggcctgtggtgctcatggacggaggggcgtgctgggtacccgagcccattgtgatccggcagctccactgcttgtcctggagaacttctatccatgcagttccctatgacaggctctgaggagacacagcagaatagagtcagtggggcggaacttctcccagcactggaaactcccatccaagaaatgtcttgcaagggacaacgggcaaggctgaggagatcatgtacaccaaccgctgatcctcagccggcgtcatggcttagaggagcctggaccagccctccaaaagacgagctgtaggggaggggaccacacccttagggaaaaaattccacgtaacagggcatggctggaccccaccgaaccttctcttctttcatttctctgttgaattaacagtgatctattcccaaacctaaatgcacatgagaattactctcggagctttcaagaccctctagccctagaggatgcatctgttctgtggctggctgcgtcctctctcctcccccggtgacctcagtgtaccacgctgctactctcctctttctacttctctaactgctgcttctgactcctttgatggcccctccaccctttctaagcaagtactctccacatttttgtccttgaccttctctctccccacacttactctggcaacatcatctattttcatggctgtactgcctttatgtaaagaattactgaagtgctcctttaagccccagatccatacttccagctacttactaggtatctttccctggatatctaaccagcatgtaacacttaccatgtccaattccaaacccatccacttcccccataacctgctactccttcagacattgtcgttttgatgcctcattttccaaatcttccaggcataagctcttggggccactattgattccttactcctggtgctgaatctaactctgcaatgctggtcacttcagtccctttgttgccaatctcatggaaacctgattacctcttgcctggattattatgctagcctcataaccaatcccctactactaccctacaaagaccaaccgttctgtagtccattcactttcattttacaacactgccctgggctatcttccaatcagtgtctcatattcccctctccatacattctaagctctagtcaaatgggaccacttaactgttccccatctatgcacaattctatgcatttgccctcactgttccttctatctgcaaataactgattcttctgccttcactcctgccaatccaaagcaactcatcattctacatccattatcatatgctattgtctttattaaacttttcctttcaaacagaaatagatcatctcttcctttaaacttcaaaagactttgtctctgattgctctaacattatccttggtaccatgttcaattatgtacttaatcattcacattagactataaattctttgcaggcaagaactatatctcatgtatgtctgtgaatcttcagtgttctagaacattgtcctatacccagtattatgatctctttcactgatgtcagtaaatgctctttaggccgggtgcgtgtaatcccagcattttgggaggccggggcgggtggatcacctgaggtcaggagtttgagaccagcctggccaacatggtgaaaccccacctctactaaaattacaaaaattagctgggtgtggtggtgtgcacctgtagtcccagctactcaggaggctgaggcaggggaattgcttgaactcagaaggcagagattgcagtgagccaagaccatgccactgcactccagcctgggcaacagagtgagactctatctcaaaaaagaataataaaaataaatactctcttaatatgggttactatcctgtcagagcataccattctatggactagaattggagagaaaaaggaatgagtatttcttcttgatcaaggatagtcaagaagactatcaaagccacacctatgttgacaggatcctcctggtagcacttttgacttcagtctttaaaagcctgggacttgaaaataagttgtgtttgcttggttggttttctgagttaaagcttcttggaaactactgagcttatcttggatgaactgactcttggtgggactaagtttaaaacaaaatctcttaatagcaaacacagctgtaatgctaactgtgccattccaatgatctatttaaataatgaaagtaaagcatacttcttgaatgttgggtaaaggatttcaggtctctgtatttcaatggttttctgtaatgattaaggttaggctgggacttaggggcagaggcaggatggaaagggaggggagctaactgacatgcccattgctagtaatgcaagacattctggagaaaaattagaggagggagcttcccagctaccaaagatgatggcaagtgagaaatcttttgaaagttctctgagcaaagaggtaaaaggaacagccagaagccaactattttgctacagaaagctaaaagccagcagagagaagataaaagaaaacctacaccaggacttgctctgtgggattagcccgcccgtcctacccactctgcccaattcctctcagtgggcactgctcgcatgttggcgccagggccaaccaaaaaccactggcaggaagtggtgcaacatggttgtgtgggagtgaggaaatggtgattctgtctgctttgccaagaagcaatgcgagcagccgcttcttactttttcaaaaacctatattgtcttctttgataactaacatcatccactcaattcctcggggtgcttttttcctttaagcctgattatatagttggatgcaaatctcatcagttgcatctctttgctctccgcaaggacaaacatgagcgctctcctgtttaaagatttttaaaacatcattactaaccatgaggaaacagcaaagctaacaaaatgtatatagtcctggttggagccttcctgcctcttctggaggcctcagtgttttggtttgtttgccgtgtcttttaaggctcttttccttccctctctcagacttgtttttatccctgagaatggggcctctgcaaaccaaaacacccaccctcctttgggctctgccttgtctgctgtcttccccgccttcaggtctgatgcctgtaggcaccaagacagagcaagcaaccacctgacaaatcatgtagggggccttcctgactcccagcccagagctcatccctcagccaagctggagttgagcacaagggtcatgagcacaagctctggggtcaggaagagttggccgtgaatcctggcttagctgcttcctgaggagcaggagctcgggcaagttatcttgctttgctgggtcttagttatctgtacaactggactgactccatgggtgtggagtgcttcatagaggttactacactgtaaaggctcaataaagtctagcatgatttatattcagtttagagatgttatttctgagtgcataaggacgtgctgagtcagctgacaaaaacaaacaaggaaattgatttaatcacagaaccctgcttgcagaattatgagggacaatatacccatatgtaaatgaacaaatgactcagggaaactttaatttccaggagaagcctctgattcaggacagacaaatgtcagttaaaagccagatgaaaaagagtattaataggagtcaggggataccccagggctctgtctgctcaagtttcagtatcatcagtaggtcaaagacctggaagggctagcatctttcacttggcagctgtgcttggagggtgcagagtgggcaaggaggcgtaaaggaaaaaatacatgaccaggggatcagaaaacttgaagtcaggacccagctccctcaccagcaaagtgttggcaaatctttcagcttctcctcaaggttcctgatctgaaaaatgacggttgtttgggggctcgaaaagacaacacatgtgaaagagtctttaatcaactgtaaaagaccaaataagtcaagtctgatttttggtaagaatgctgaccctgagtctagaagtcctttgtgacactctataaataagaccctatcgaccattttggggggtacaaacagactaacccactgcccaaggaacatgacattcaggatcaaatctttggcaaccctttatgccaattcagcagctaccaaagtcatggaggaaagatggttcccaagagctacatgctcgaatatttatcaaactaaagctaagagagtgcagaggtgggatgatcgtccgatcacacaaggggaaaagtgcacaaacggacacaatgcacgccacccaccttcccggggaactttggggcaacctgcacaattctctattgaatctgtcaatgttgactcgtcctgactcacttactgggttttgagagaaaatgggagcaataacgtgactgcatactccccttaaaggttctggggtaacccctcccactctgtcagcattttactgctctatgaggcctgagtaataaagctgaggctgactgagctcagagaagaggatgtggttttctttgtgagttccagttggtaatctcatggtgtagattggttatgctgctgtgtttatttgcaaagtcaaaaagatcaagtgtgtgtaccactatagaagaaagacaaaccttgtttttccttctagggtggcaggcagggagattacggacagcatggggcatgtgaaatcctgacacttctacaaattgggaagaaacctttggcatgctgcctgcttagtgctctcacagtgcctggcctcatactggctggtggcaaatcgccatcaaggaaataggtaaccatggacactgatatgatggcatctaattttcctttactaataccaatatggctgggtgtggtggctcatgcctgtaataccagcattttgggaggccaagaagggaggattgtttgagcccaggagttcaagatcagccccggcgacatagcaagaccccatctataccaaaggaaaaaaaaaattagctgggtgtagtggcacgcgcctgtagtcccagctgctcaggaggttgaggtgggaggactgcttgagcccaggaggtcgaggctgcagtgaaccgtggttgcaccactgcactctagcctaggtgacagagcaagaccctgactcaaaaagtaactaaataacaccaacaatccctgttcatctacccttaagaaatgctaagaagatcacactagctctgctcttctcagtgatacttcttgcagcactcagtacctagcacttcatagcaaagctgtttatgagcttgttttacatcccctagtagagtagaagctccctgaggacaggttatcctttcatctctgcattctcacagcacctacagtacagtcttgtgcaacacagttgagatggagggaccattaaaagaaacagcaggcattccttcctggcaaaaaggttgagaagagtgagctcccccacttgcctgcagagtggtgggggcacagcattataagcctttcgtgacagaagtgaacagcaaattatctgatgattttttcagtaaagtaaaaatgtaagctctggagtttttaaaagaaacctgaaagccaggcatggtggctcatgcctgtaatcccagcactttgtgaggccgaggtggttggatcacttgaagtcaggagttcaagaccagcctggccaacatggtgaaaccccgtctctacaaaaaaaaattagccgggtgcggtagtgcacacctgtaatcctagctacttaggaggctgaggcaggagaatcgcttgaacccaggaggggtaggttgcagtgagccgagatcgtgccactgcactccagcatgggtgacagtgtgagactctgccaaaaaaaaaaaaaaaaaaaaaaaaaaaaaaaaaaaaaaacttgagtttttttcacagtacagctgaatctagacgatgcattttagaaaacctctgtccttagcttctactaatgccttcatgtacactgtacttcaaaccagccaagcctgctgctgtccttggaaaattccttgagacagtctcacccattgttcttttctcttgcttctcctctagatccaaatggcaaaccttcttcatccaccaggacccaacccacaggctacttattgctggaaacctacgttgttccttggattgaagtaatctctccctcctctggtgcgcccacagcacttgcaccaacagtgggtactcaacagactagcgtgcctgccgaagaaggggtcctctgacaatcaggggacaatggggaattatgctctccagactttctacacacacaagtcacacaggaaggaaggtaaagagaaactagagaaaataatttttgaagaaaaacatttcaggaagtattgaaagtacacggtaactcagcctggggcaggggtggagggcagcagcactgtttgctgcagctatgctccttcctcagtgccctgcacacccgggacttgctcggtgagcatctctcgtgtcagtgacagctagtgtgagtactcttatgttcagctgcccctgactacctcttgactttggggacaagttacttaatctctgtgcctccgctgtttcactggtaaatgggaataagagttggttattctagggttgtagggttgttgtaaggattaaatgaatccgtatgtgaacagcatttggtgcctggcacatgtgagctcagccgggcgcggtggctcacgcctgtaatcccagcactttgggaggccaaggcgtgcggatcacgaggtcaggagatcgagaccatcctggctaacacggtgaaaccctgtctctactaaaaatacaaaaaattagccgggcgtggtggcgggcacatgtagtcccagctactcgggaggctgaggcaggagaatggcgtgagcattgtaggcagagcttgcagtgagctgagatcgcaccactgcactccagcctgggtgacagagcaagactccgtctcaaaaaaaaaaaaaaaaagaaacgtgagctcatctccttttcatgccaactatagtgtgctaatctgctggaagcttccatttgcaggggaatcttttccacaacatccccataccattatcccacctctgttagaaagctcccaggctgctaaggcagcctgttctggagagttcttataaaggtcttccacagggtgttgaaatttgctgcaacttctatcttgatcttggttctgccccataatatgaacccagaaaaatctaatcccttcttccatctaacaagcgtgatgtttctcttagtttttcctcccaatcctaaacaccctcaggtctgttaaccattccacctatgacctggttctgaaagctcccaccctcctatgtctactaagaatacagcagccacaggtgaacacagtacatctcactggagccaatctctcagctggatgacacccatctgttcaaaaggtcaggattgaattggcatttcaggcaacaattcccccctaagagcgcataatgagtacaacctggcaccaccaaggcgttttcacagacaccgctttacagcaaggccttctctactgctctgtgctgcaggaccgaattccccctggggctgagttttcagcactgactttaaatgacagggcaggagatgcaggtagttccggggagggaaggatggaagaaactgctcagtctcagggttgtacagtttacagataaattgctttttattcccttggatggcaatggtgaggagtggtaaattgcaagattcctgattttgtctaggatgaatgccgtgatgctaatggaactatattttctaagtataacttactaattgcaatcctgatctccttcagaatgataatgaatatactcattaattataaagtggtacaaaatgaaatgataatggggccccttatgatgctgtaatattctgcatttagctcactaataaaacgaccagagtaataatacctcacatttatgcactgaactcatacatttcagatgatctgaatgtgcctctctctctcatgcaaacattatgtagaaacaaacacatatatacatgttttcatctccacagatacgccgtaagatactccattgttcctccaacaccttcttcacagatgaggaaaatcagaatcagagggattaaatgacaaagttatcgtatttatgatagctgcaagagcagaattaaggtgctctgactcttgttcccacactatttacactaaattatgttgggctgactttttttctattgcacaagtttaaagttagctgtttggatggcagtcaggaatttctggattccaagaaactgtggtatgaataagggaaatggatcatctatcttattgactaagtgttaattttgtatcatggtcctttgattttgaaaatggaccccttgcccaccaatacccacttcctacatgcttctccccaagaaggtcgtgaagctcagaaattctttttttcttaggaacacagaatactagctgaaaaaagataacattactgagtcagttgattagggcagactggcccaggacttccactgtgaggagacacttacctctgctgggcaccttatttttactgaatgcagcagttggctgatgaccatagggatgtatccccaattcttgggcatgactcacagttcctagcaaagattcagggtccccaggtccaccggtactcaagagcagagggctgtcatggcaacctttggtcaatgtacttgaactcttactgtcttggaagccatccttggccccctcacacgagcagtcctcctccatgctctctgaatgcatcagtgccggctggtgagcatacccgtggggcggggtgggtgaggaagcctgtgagacacattcttgtgccctgatttgtagcagatgctgggggctggtgtgatggtgataagagtcagcattttgataagataaagcctggcgctctgtcatgctctgtcccccaaggctgggagccagactccccgcatccccttggttcatgtgcctgaacagttcctggtattcttgctgttgctgctgctgctgctgctgctgccgttgttgctgctgccttttaatgagctgtgcaaactctgttgggggcagccggatgtccgagtggccggtgagcgaatgccggggagaaagcagtccttgaaggatgtggggtacctgctggtgtcttgtatagtctggcggcgtgggagacagcagggcctgctgcagtgccgacgtggtatagtgtggcggctgctgatgtgcactgggagggaaggtggggaattggtcaagtggagggactttcagggcttgggttggagagaaccccactcctgttgaagggctgtagctgctgggggaaccccgggactggtccgaaaacagatgggggtgtaaatgcgcctggtcgtagttagcaggggagaaccgattcacgttcaagctgcagacacaaaagggagtaccagacatccatgtaacaagtactagacttcctgggaacagctcctcctcctcagtagggagaacccactggtacagagaactgtggtgtgacagagaagtggcagatgtatgcattgtccctatttattccattactggcttgtccagtaacctccaagggactgagggcactgcgtgggtaatagatctagctcattttgaaggaagcaacttcaagatgctcccttcaagaaaaggggaactggaatttttatacattcctctaacaggccattttcttctttgcaagcaaataataaggtagcaaataataaggtagctttcccattttccacctcagtctcattagaattttaaccctgggtcaataaaaagctgacaagttcattccaaacccagcatcctgattttagaaagcgtgaaacaagagcacagcctagtcagacccattctccttccctccttttctctcactctgctaaggggcttcctcccacctggatcccatgcatagatggctgggtgacgttaggcggtcttacctgtgagcctctgcactgtcagcactcagctgcttggacaagggacggtgcccatagctgagggtggccatcaggttggtacggtgctgcatctgcatctgaccagcactggggctgatggagatgccgcgcccactggagcctgcagctgtgcctggcatgttgctgagcatgtcaacaggctcttggacttggatggtgacctgctgtgactgagcaggctgctgcatacccaagcaggttagtgccacgttgggaggagaggaacagttctcaggttgctgctgaaagattgcactgcgggaaggtaagccttgaaactgggaagaagatgcagcccctggagagaaaggaacctcagagtgaccaagtgcccaggccaccagccagccagaagtaatgagagctaatgagaatactcagacgacataccagctagaacagtgcttctcaaactgcactgagcataggacaagtctggagaacttgttaaacagaagattcctgggtcctatctatataattctgtttcaaactctgattcagtaggtcaggatgggcccctaagaatttgtgtttccaacaagttcccttaaaagctggtccatggattacatggggtaactcggatctaggcagtgcttcttgaactttcacgtgcacacaaatggcctggcatctggttaaaaatacagactctaggccgggcgtggtggctcacacctgtaatcccagcacttgggaggccgaggtgggcggatcatgaggtcaggagttcgagaccagcctggccaccatggcgaaaccctgtctctactaaaaatacaaaaattagctgggtgtggtggcgggcgcctgtaatcccagctacttgggaggctgaggcaggagaatcatttgaacccggaggtggaggttgcagtgagccgagatcataccactgcactccagcctgggtgacagggggagactccatctcaaaaaaaaaaaaaacagactctaacaggtctggaatacgacctgagatcttactttttctcccaatattggtggctgggggaccccactttaagtaggaagagcctagaggccaattcagactcttctcaaggatcctagggagactgactagggacgtagctcgtggagtgttactcaagagatcctaagacggctgacctctgaagactcacagtcacattatacttatcttcactcccatctatacacccacaagagaggggcccacgtgtatagtagacagccaaacggaggcatgactataaggaaggttctggtagctgctttttatttggtagggctggaggttttgttaaaaatattaataatagtaaacctttattgagaactattttgtgccagagactgttccaagtgttttacgtatatctacatactgtaccataattatcctcagttgacatttgagaagtaatatggtttggctctgtgtgtacccacccaaatctcatcgtgaagtgtagtccccatgtgtcaagggagggacctggtgggaggcgactggatcacggggcagtttcctccatgctgttctcatgataatgagggaattcttgagatctggttgtctgataagtttctggcgctttcccctgtgcaatctctctcctgccaccatggaagatgagccttgcttctccttctgccatggttgtaagttttctgaggcctccccagccatgtggaactgtgagtcaattaaacctctttcctttatcaattacccagtctcagtcagttctttagagcagtgtgaaatggactaattcaagaagtcaagttaacttacccaagggtttacagctaagaaactgatggaaccaggatgcaaaccaaagcagcttggctctagagtccatacccctgaatactatgttattctgcctttcaaatggtttatggtgctcaaaactgagaccatcattttttcccatgtggcataaaatgaactgtttggtctgaacctctccactcaccgtgaggctggatcatggcactgctcatggggggaggactattactgggctgcctgaagagatggttgttggggtggttggggggtgggcttgaaggctgaatccttaaccttaaaaataacaaaagagatacacaaagaagcttcctaaggtgacagtacaatcttaagtttcagccatacaacatatatcagtggaaactatttttttttactttgataagcctcatgttagaaaaatatacataagccatccaccacagtgtatttaaaacctatctacatcttgtttgaaaagaactcagccaaaatggcagagttcattgtgggcctatgtctggctcctgtattagatatcagattactttgctcatggggctaaggaaatgaagtggcacaggaagttgggatttcaagaaggctcctgaaatttacagtggtttctctccttttcaaatagattcttgcaagatgaatgctcaagtcagtccatatctcccagtgagtcaagccaagggtaccatgctatcgagacaatggcttaggcacaacacaaaatgactcatacctctggagctgatgggtaaggagggctggctgattttcacatgcagcctgaagaggtggagatggctgaggaggacagatagagtcctaaaacatatatggggaaaggaaaaaaattattgtgagcttgaagattactcagagctattctcaggaagggaagaaacagaaagaactatctgtgtctcagatttatgcttttgttgttcaccagaaggtctgattacctttactcaaacatgtcaaccataaacagacctcaaatccactttgcactgagtggtctcctccaaaatgcacaggcaaatcagcctgaaagcaaactccaaacaagttggagaaagcaaagagtgagggcctacttgaatttgttgctggagaatttgatggtgctgctcctgctggtataacatatgctgctgctgggtcttctccagggttctttcatcaatctgccccccgtacatcttctgcagctgctcacactcctgaagggaaagtagttaatacagatgggatgcagccagacccgcctcatgcagtgatttcagcagatgcagatctgcctccaagctctcatgggcagaaagagccgcaagagaacagtgtccttgatgagcaattaactcatttacctaagtatctggtgcactaaatagattcacatcctgttctgtatgaatgaatggaaaacatcaaggatggcctttgtatgagtacaagtgtccaatgtgaaatctgtgtacaaagcacatgccattggaagcttggtcatcaggaaggcagaaaggaaattggctctttatagaatctttatagtacagaaacatatagaggtacatttccttcctctgagagtgccgttccataccacctggagagaatgccaggtggtaacaatgtacagcaggtttaatcaagacccagcatcctaaatcatgcgcagagtgccaggcgcgcaaggtggctcacgcctgtaatcctagcactttgggaggccgagacgggcggatcacctgaggtcagaagttcgagacatagcctggtcaacatggtgaaaccctgtctctactaaaaatacaaaaattagctggcatggtggtgcacgcctgtagtcccagctacccaggatgctgaggcaggagaatctctagaacccaggaggcggacgatgcagtgagctgagattgtgccactgcactccagcctgggtgacagagcaagacttggtctcaaaaaaaaaaaaaaaaagtagcaccttctctggtggttcccacagaaacccaagcccagaaattcctttccaatgaactagagacaggagaaaaatttagtcccttcacaggggaaggaagtttgatcctggggagggctgtacataacacaaagtaaagaaagtgcattagaaagctatactttctttttcttttaagacagagtctcgttctgttgccaggatggagtgcaggggtgtgatcttagcttactacaacctctacctcccaggttcaagtgatcctcccatctcagcctcaggagtagctgggactatgctaatttttaatcttttgggggagaaagggtttgccatgttgcctaggctggtctagaacttcagggctcaagcaatcctcccacgttggcctcccaaagtgctgggattataggcgggatccactgcgcccggcccagaaagctatacttttttaacctataaaactgcaatgttgctgacataaaaggggtacgtttaccaccccagtcctcctgcaatcctggcctctgtcacccatgctcctccagggatgcctgccacctcttccattacctgctgcagctgtttgatgctgctgttgttgcccattttttccaggtgagctttgaaggcctggatgctcgcagccccatctgagaaccggcgcacaggggagaaacgctccgtagggaggtgcagagtgttggagtccttgtaggtagagctgaatatatgggaagagaaggttagaggctaggactcaggggctttgaccaaatcacacagggactgctgttccagatgaacataaagacggctggctgcccaggtagccctgcatattatgccactttcatgccatttccagacatcagtcatttccctagcctgcttccctttagagggctccaggtgtacatcttccatttctacttaccttcggttggcttactttccaagcctggtgaggtcccgagatcaagtacatccagttcttataaatacactaggccagagagaaaagcttctcaatatcctccaggccagactgtacagaagctcttgcttttataatcatatgtctatctagtgcctttagaaaccttaaattcaccatttgagccaaagttttccctgagcaatgatctccgtatggccagagggaaacaacagtcagttttgtggtcaaaggtctggcctagaactcataggttctgtgacagaaaatagaaggtggcgattggggtgggggaaaatgaagacttctgatcctgggatggagacaacaaattcttaaggaatgtgggccttgagatcctgcacgtacctggtcaacaaataaggtcacctactgtgaaaatcaacttctcagagcagcagcactcacccaacctcctaatgaaagaggaatcatatggattaccttcaaagaccccactgctcaactggaacacagccagaatcttacagaaagaaagaacaagctattgataaggaatgcctaagacagcatcggggttagaagctaacacctactcttgtgacctgatgatcagaaagagatgtttatgggctgaggtaagcagataaaagactgccaaggcagcagcattccagtagcagatggaaaggatcagggtttcatgtccagggcagagatgccattacactgaactttggatgaaatgatgtgctaccttgccagtgattcatttgggactgaagcagaaccacagctcaggaagcaggttaacaagcgagttcaaatacaatgcagacagcgcgggaccaggaggaatctaatgaccgtgcagaggtatccagagagttctggcagcaggtgaaagccttttaccctgtctttgctaatgatggcttttgtttcagactctacctgaggcttgacccagcagtgagctaatgaaatgagcacgaacatgtatttggttcagcaacacaaaaaacaaatgaatttggggggccacaatccaggaacagggatcatgaaggctgtgttgagaagcatttccttataacttgtcatttctgtttctacttcaggttgaagtagaagcaagtaagtactattttctcctaaaatttgattcctatgctttcaatgttttctgaaatggacatgtttctgatcccctcagaaagccatgttcttcaagtagcaatacagtctttctgcacaaaaataattctctcccatcacagaaaatcccaggtccaggtatttcatgactttttcagaagctcaggttgtgaagagactgatacccaggtcagtccagcacagtaacctcagaggaacggttctgatgcagttgctcatttgagaagcactgataagtatcaattgtgcttgattttatttttatttgcaatcacactcaaattcaggatggcctcgcattaggctgatactcccacactatactcttcaaggagggacttggtttcccacctggataaaatctatcttgtgttagtttaaaaaaattttttagttacactttttaaaacatttttaaccttaaattacacatttccagaaatgaaaaggttgattagaccactcttctgtttccatgttgaacttcatctcttctaccccagaaggatagctatatatactgttctttaatcatttcctccagaaaatgaaaggaattcaagaacccatgcaggccacccgtattccatgttttatagccttggaaagtttctcatttcccctgaagactggctttaatctcttttgctgcatatttgtatagtgatcccatcaagacatgctgggtttgcacaaatgccccatcttatgcaatttgccactcataaaacatcattttcttccaattcaaataggcttggccacaggcaaccctcaaaacaccaaaaaggttcacatgaaaacagacagcagatagatttccagcaggcaaggccttgacaatgactctaggcagggtggatatcacacagacagagctgtggtccagtgtggacctccttgagtaacaaatgtcaacagaatatagggtctgtgataaagcctgactctggaaatgtgacgatcttcatgttcccctcataagaagacctcctgaggaacacctagcattcaacaaggatacctaaaggacttcagctaaacaacagactcagacaagggctgaaacattaagtgtcaggctgtggaggaagggaagaaggagacaaggagaaaagaaggaataaagggtgtattagataccagtgtagagcttgaagttatgagaaatcacaggaaacgtataggggaggagaaggcaggtctccagtaatcactcaaagtgctctttatttatttatttattgagacggagtctcactctgttgcccaggctggagtgcagtggcatgatctcggctcactgcaacgtctgcctcccgggttcaagcaattctcctgccttagcttcccgagtagctgggactacagacgcccaccgccacacccggctaatttttgtatttttagtagagatggggtttcaccatattggccaggctggtctcgaactcctgaccttgtgatccacccgcctcggcctcccaaagtgctgggattgcaggcgtgaaccaccgtgcctggcctcaaagtgctctttagtgtgtacgaacactgtaagtcctgagagactttcattagaaaaagcctgtctttctgtgccatcagagttttatttgagaattgtcattcttgctactcctgacagaccatttttaccaagttactcatagtcatttatgaaagcttatcttccttcttttagggttccaacgtggcactaattatgtcccactctgctcagagttcacttgcctctgctgattatgttgatgccaaatgggtaaccagcctcagtaaaaaaaaagtgtcaagcttgccagtgcaagctggctgcaagatttcataacaccacatatataaacctagtttccttggaatctgattgcttttcaaccttcccaaggctgcttttcagtgtcctccccaaaagacagaaataaaatacgctctagtaactggtggtggctttgaacgtgtgggccatgagcttggggatagcttcggagtggccaagactgagatttttagtcatcaagatagtcacagaagataatcatcttcttcaactagcaaagtgtcattccgcagctgcttccaggcttacttggagtcaatgaagttttcttggtcaggaaggttaaacttgcttttatttcttcaagagaatggattataaccataaccgaacctagcaaaagatttttgccatcagaatattgaaagaatgacctcttaaatacatcgctcaagaggatctctgctctactattcagaaggggctttgtcttcatttccaggctggcggttcaatggtaacacgatatgaaatgctcattcttttgaaggtgatggattattaaaggtcaagtctatcgatatggctaaaaatcttcctgtttccaggtggccttctgagagtttcactttcttgcaggtctcaagttcaattttatctatgaatcaacatctagaatcatgggaatcaaatgcagacaataaacaggtctgcaaggtaatgggagagaggaatctcgcattgctccagggcgcagtaaaaaacctttgccctgtgcattgcttactgcaaggagctgagaagatgtgagttcaggatgacagctggcttctatttaaagccacgatgctagtcaccgtcgctgtgagactaatcagaagggtgcctgtccgatgagcctcaaggagctcgcacagctcatgtggctactcaccgatgctgatcaggtaccaggtgaggaggccagacccgggaacggaaaggctgctgtcctagctgccgttgtaggtccggtgggatctcagctgtagggttggtcatggccagtgtatgtcttttggacctatttgccaagtacctgcaacaagcaggagcacatttcatagtaaaaaagacagacaggaatattcctccacaagaagcattagaagttaatccaaagcactcaatgaaatagtgccagagctcacgaaggcttgatggcaaacagatccctgcctggatggaagtgagacacgtctaactggccaacagaagttggcttgacaatgaagtggctgaattttgaacctaagaatagccattgaagagaagagagaaagtagatctagctcacaaagatgagatcacttttccttgcttcattctactcggtagaagaatttattttctccatgttaatttattcatcttttccctccaaatttccaaaatacaagtcagaggaaatgagccctaaggactattcctagagatgaacctggggagatattcagaaggactctgtgcatgtctctcgatctcacaggccccaggtttgagactttcttcactacaggtcacagaaaactgatccttccatttgaggataaatgaattccaaaaccaccctttccctctcgcttggtgactataactcaatcatcagagaagaaaaactgatgttgtccttggggaaccaacattctgtggaggatgaagaaataaaaccacatgaaatgtttagttagggagggaaaaagcaaggcaaaaaataaaaacagaagagtctcacaagacgaagagttcccaaactgatggcttttattcggaagatctttcagacccagcacttagttaataccatcaataagatattgtccctctttgtctggtggatgacttcctccaccgctgctgctcttctggaggcatgaataaaagaggcactacaccttttttattacatcaaaactgatgggcattatacccttgaaatgttggtctaaagaagaaagaaggtagacctggaggaaggaaagtctaagacaaagaagataaaatattgctgtctcttttaaggtagaaaggcagtaaatttcctgatttctcatttcttcatgacccagtagggcccatttgtaaccttatataccctcttatcagcaaactatagaaacaacagcatcaaggaaaaaaaaaagttaccagaattttccttctattggccaagctgtagaaggagctggcccacctgccaacacccctgtttgccatggttttctttccacataggaccagctgctttctgaatagcagctctcacacagagctactggggataggatgagagtcctagccagcaactggcaggttcttaaaaaatggtctcatttcattcttaactatcttgcccctttcagctaaaatcagttaacagactgtagagtaatcagtgttatgtgaacttgccaaagagtaagccattaatgttttaataaccattggataaagacacccaaagttccccaaaagcccatgaaaaccattttatttcaacttccctcaaaggaaaaaacatataatcttgaagaacacctgtatttctgggaaaatacatgctggattctggtgaaaccccctccccggataataagaaaatcaactcccacaagggggcatgcatggagctaaggaccagggctaacggaactgaggccaaatgaacagtacagcatgcctgatggtcactgccgttctctgtgagttaggcatctctcaacaaggttctgtaaacaatggatatttgcatctgtccctggcccgaatcccatattctctttttcaatatctctttgttggtacaagggggtggaagaagcacacagcaaacagtacaagaggtattcattctcctggaaaggaaaagtccatgccagaggtccatggccacactagctaggatcactgtcatcccacatctccaattccttttcagtaaacagttcttggcaggtacgagcaggctttgtgccttgtgaatactatcagagttgcaatatgaaggcaggggacaaggaagaaggagggaggaaagaaaaagttcttatggttattgctgtcacttaggggacttccaatggtgcttacagaaatgacattttctgggtagtcttctgttacttccatgtggggtggaacatgccatctggcttgagcaaagagaccacacaaatgttgaagctgcactctaccacctccttgggcagaggtgacctttcgctggttgcaggggagcctgcccaggggcttctgcaagcactgccagatgtcacattacctctgcacagcttcctggtctggctccccgtctgagctctcctcgtccacaggggtaactgctggcactgcctgaagagagacaggaaggaaaagctcaaggtggcagcttattctgtcatgcctcttactctagtaactgggcttggggcaggactttctgttaactttcttatttacagaacttttctagactcctgggttatacaggattttcatatacctatttttccatttttaccttgcttaggtaatactaattagaatttcttcctcttatttatcttcattcattcatttattaatctaacaaatagccaaatgcttactgttacaggataaaatgtgaatttacagacatagaccttgccctcattttacagtctagtagaggatagagacaagtaaacaattacaaaatagcatgatcaagtcttctaatgggggtgtttgggaattaaggaaggcatcctggaggaggtagcacctagcaggaacctgaaggatgcacaggagctggtcaggcaaagagggacaggagttacaggtttccaggcagaagaaaagagaaggcctgtaggtgtttgaggacccgaaaatacagtagaagattgtttacctgaaatgtctaggacttgacctgttgtttcatattaatgtgatttccggagtttaaatgtcttaactccaggaaagcatagtgaattactgaaattacattttggtacataagatacaattgtgtagtatcaattcactgctttaaaatagttgttactcgccaaaacatgtgagtgaaatgagaaccaccacaatgcttgtatcactgtgactttcccatctgcatccttgctagctacccatagcctgggtgcccacatcatcaccatgccccagtcactagaacaaaaatcacacttcaattattataaaagagtattttacaaaatggctaattacaaaacaaaacaaaacaaaacactcctggaataattttgtcggaaagctcccagggttcctggatcccttcccacagttctacaagggtggagtgaacagggtgaggcaggaagtggctgtagatgaggcaggagaggaacgctgtggccagtgacaaatggtcttgaataacacactaagaagtttgaggaagaacagtggtgaatcactaaaggattttaagcaggggcatgatgttataaagatttatatttgcaaaagccagcttactctagctgcagtgtgaaaagggctggtggcagggatcaggggacatgactggaagcaaagaagtcagttaggatgccgtggtgttcatctacacaatggatgacagtgacctgagttaaggaaaggaaagtggagaggatgtttcattcacaggcactggacaactgacttgatatggcaaataagaaagacaagagttaaagataaaattcacatccctagcttgtgtaacccggagaatgacagtgccattcactgtcacccaagaggaggagcaggttttacagagtcatggtaagttcatttgggacatgctgaattaaagttgtgaatacttgtggaataaccaactaaatctatcccataggcagtcatgtacacgtatgtgtagaactcagaggagcattctgggctggagaatcagagagtaactgaaattacaggagtggacaaactcatccagagagagtacatcaaaggacatgggaatagggcctaggataaaactctgggttttgccaacctcaaggaacaagcagaaaggaaatgtgaaaaggagaggtgggggaaaacacagggaatgtggtgccacagacaccaagaacagaaaatatttcaaggaaaaaagaagtcaacagtgattaatacagttgggacgtccaaaaagataaaaggttaaaaatgtccactgaatttatcaacaagaacttgttagcgaccttggcaaaaacagttacagtagacacagtaagtcaccccacgtcccataaagctgaccatgatccttccaaacctgtcttgcccatctctgaatgcctctgccacctaattttccatgttattactgtggtacttaatcacatatgatcttgtactattagtcaaatacttcacatatgttgatcttgtcagtgatggcaagggctatgatatataattctttcattactgaaagtgtggcccatggacccatgcccacaaactgttttgttaccaattcatgataaggtaagtacagaaatcaacaaaaggctttcagaaacttttagcaatttaaaaaaataaataaagagacacttttagcaatttaacagagtaattttgtctgttgaactcaataaaaaatgccttgtattttatatgtgtttaaattttcactgttctaatgtttcacttttactatattttacaagggattaacccatgatggattaaaggagggaaaagggtcctcaaagcagcactgcccttacaacatctccaagggtgatggatatatttactacccaatcttatggtactatgagattgaatgaataaatgaatgaatgaatgacctatgacaggaaaataaacagaacccaagggagaaaaaaaatctctgaatgtgactatcatatgaaggacatgtgactaagataactgactcggctaaagctgtgggagcaaatcatcaagtgatccaggttatgccaaacatgtgaggtgtgtttatcaatggagaaagcattagtgaaaaggcaattttggaagccagtctagaaaccaattaatttaagggcactttggccttctggcagggaaaggttgcctgggagaaggctctgagttaggctgctacctgccccaagctggcaggagtgcagctggacttaaccagggtacctgtgagcgcccattgaggaaaaagctctccaggagtggagttcaatgtagaaataacttggctaagtaagtaagttcgccaaaaataaagtgtggaaaactctactggcctgaagaaaatgggctggagcatcctaagtttggagaaaaaggaaattcagacatgtaggttggccctgggttcccaaccccaggctcacaacctttttatcaaaagcctctgagacagtgaattgggctctgtgctgctactcactggtgtcatggtgacaagcggagagggtccccgtgggcgcttcagcagctgctgggcatgcagttggatgttggctcctccatctgatgccctccggccaagggggcccattccattcaacagctgtagcgtgggcggctgtaggagagactgctcctgccaggaacagagtggggaggacggaccatgagatgaggggaaggcggggagaaaggggcaagccactcatctatggaaattaagggagccacgggtcatgacagagactagaggacgcttcccgctcacccgagctactttgcaagataaatcatctttctctataagtaaacccttaagtcctagggaaggtgcctcatagcctctcaaaggaagctcaagtttgtttcttctggagccagccctcttccatgtctaggtaccttgtactcaagttgcccggttggttgcaagttttgcataggcaacaggttgtgcatgaagttcacattaggggccacctgcaggaatggagcctgggggttgactccaggaaagccaggtaggagcttctgcagatcttccataacttccgtgctgatacaaaacagaatgacagagaagtttagttaacattcttactcaaaagtgcttatatcccaaaactgatggcattgctatgttcagtacaacttattttattttcttcctgaatttatgtttctctttaagatcctaaagcaaagcaaaagcctaaagtgtggaatttaactctctgctcctttactatttgggacgaaggattgctattctttattggccattcatgtaaaaccaacagctctgagccaagaggaaatagtggcaccagtccagttcaggttttcaaatcctggaggtgaacaccaagtttctggagaacatgggccatccactaagataatggctgcctgaagtagcaactgattcaccagggaaagaatgcaattactcttgtcagtgctgataggacagataagtactagatgtacagggctatcttgctacaatgataggttttacagcatactttaaagtaagacatctttccactaacagagcgactcagggctccacccctttaaagctatctcagtctgtggagccagaatgttcccctattgcctatttgatcataggctgagaacaagagacataaagcaagcacatcagcaggcatgggagtcttttttggaaattcactggaagaaaagagatatttataagaaaaccagctttgccctgatttgacctctcaggagaattcttgccacaaccttctcttcctactcagcaaagaaaaaatccagaaaagaggtaaggctattttaatgttgagagtcttcaaccgtggaacaaaaatggggcgagctggccttcagtccattttttccagtgtgcaggcagcagggaacatcatgaaagactattttgggaaaacactttgggaaactgttgttattggattttggatccttattcatttaaattttaattgtctacatacataagttacatcatatcatttgtccacttggccactggattagatctcctctggggatacaatgtagtaggaaatgtgccatggtagacactgaaagtcaggtgacaattctttgccccagtgttagtgagggctgttggccggatactcaccgtgggtcagccacacccactgtgtgcctcctcattgacaaatagcgcaccaatgcttcaggggaaggctcttcaccctcatcactgtccaaattcagtgtcccatccggctgaggtggagggaaacaccatcgagttagaaatcagaaggaagggaagcaaggatatggcaaagaaagtggtttcagctgacagctcccacaggttgctacttgcctccacaatttggttctctgggttgatcagctgcacctggggaacgctgatgttcatagcagtacctgcctgctccgcctggaaagcagtacatacatatacacgcatacctttaacactagagagaaataatgagtctttccaagtagtcttgattgctaaagtctatgtttccctgattactaaagtttttggttcatcggcccttagaagtcacaacaaggaagcatcctgtgaagaggatagcatcgcctcatgatttgctatttcttcaaaaaaacaaaaggcacaactattgttgctcatccctcctctccatcaaaaaaggttcagatctttgattggcctctgacaaaggaagagatgacaaatgggaggagacagaggtaaggaagagcaagaaactctcgacttagggttagtgagcaacagctaacctttacccccctggtgttacttgtcctgaactaggtcactggagttattgcccacctggatattgactggtgcttgaaaggccagggctcggggcatgctaggaagtgctccgagacgcagggttttatgtctcttatgtcgatcacacagcaggctgtagattgcactatagtgatcataggcatctgatcttaatgactaccaagagagaagggaaaagagtacaaaaccctggtgaaatggcatgttgatgaccagaaccctttcagtaataacattagccaaagcaccttctttccttctttccaaggcccaggaaggggcagaggaagaaaaacaggaggaaaaaaaaggcccaagttcccgagaaggcgaaaaatggaaaaagcaggttagaggaactgctacatcccactttgttctccactccttcggagatacctgcagtgtctgttctttgtccagtcccatgtcctccatggccaagaggacatcctcattcagggggtccacctgtctttcttcctttagttgttggcattcagctattaactgtaacataaaaaggaggaagctgtcaaccccccaattaaccacatcaaatgtggcacagcatatataatgaccaacctgttccatgccctctggcttgggatatttttggcctcagacaaagtctaaggaagagagccctgagtgatcagctgtaaacagacaacaactcactgtttcctgagctccctggcatacctggcatggccatagtggtttaaataaaagcatgctacagaagccactgaattgagcacactaagacaagaggaaggcgacatccccatggtaggtaagctgcagaactgcaggctgtgctatctcaaaagccaaaaacagacgataatttggggacacatggtagggaaccatgatcactattctccagcagtttaactggttttacattccttcttgcttgcttcacgtgctgctttagtgttacataatagtttgttcccagtgtccgcctttcaggttatggcctgattacaatcacatgcaaaggaggctgcagcagctttcagaggagtcccctgcagcagcggttcccagctcaccctgtcaaagttgggatcggcgtcccctagcttcatccacttgtgcttgcagatctgctccatggagaggcgcttattgggatctaacaccaacatatggcggatcaaatgctcacattctgcaatggacaaacagcctgccttcagtctctggtgaggggaggcaccaggggagtagaggaaccaggggcaaagccagcagggaggctatccaactccctgcttctaattttgtctctcttgctctttgatccttacctattctgttgcttatgccaccagaaggggctaagcaaaggcagagagaggtggagaaaaagaaactcaagtgtggtagtctggttgttgccttcaccaaaaggctgaccagaaaaggtctggggataatccatggatttcatttatttatattatgtatatggccctatttaacacaagtaatgaagagtagaatggcctctaaagagattcagtatcttacaaggttctcaaaatattcagttctatcctcctaaatgtaccaccacgcgcatactaatgcttttggcttaggtgtgcaatacccttcttcaaaactcagggaacttgaatttctgatggcacaaggtgtgtggggagagagccacaggctacttctctcctatgccctgggattcagctagccttatttatcattttcttctcaatgttatttaaatagtcataggtatttaaaactgggctgtgagctacagatattcagatctatagaaatttttctctgggagctcgtattacagattacattgcagaaagaacaatggattcaaaatcaagaaacgtatattctgatttcaaaaccaccctctatttctaagttttctcatctataaaatgtggctactgagggtgatgagagtaatagttgtgatgaaggcagtgatgatgataccaaaacagcactattgatgcatcttctgagcattttacaattattatttcctcatttaatctacacagcaatcctaggaggaatgtactatcattgttcccattttaggaatagcaaaaaccaggcacagggaggtaaagaaacttgtcaaggtcacatggctattaagtcaaaccagatagcctgactcttcacctggttctcttaaccacaatgctaccctgcccctgtggtgcagagttgttgggggatccaaatcccccaacactaattcagcactgaaccattaattcaacatctttatccaagccaccatttctgacttacacgctgcaaaagtctcctacccggtctttctgcttccattctttctccattacaatctgttttctatagagaggcaaaaggaatttttccaaagcataaatttgggcatatcaccactttgcctgtaactctccaatctcttcccataaccctcagaatgaaatctaaagtcctgggcctccaaggctcctacttctctctctccctttttttttttttttttacatagagtctcgctctgtcacccaggctgtggagtgcagtgtgcgatctcggctcactgcaacctccgcctcctgggttcacgtgattctcctgcctcagcttctccagcagctgggattacaggcctgtgccaccacgcccagctaatttttgcatctttaatagaggcgaggtttcaccatgttggccaggctggtctcgaacaactgacctcaagtgatccgcctgcctcagcctcccaaagtgctgggattacaggcgtgagccaccgcgcttggccccctacttccctctctgacctggtttcctgccactatgcacatttctagtttttgcacatgtttaacacactctcatccaatggcctttacatgtgtttttttgtttgttttttcctttagtggaaatggccattcctcagatcttcatatgattggctccttgtcattcaggtaagagtttaaacgtcacttcctcagaaagctcttctttaaccatctactctaagatgggcctccagtcactctctattacatcacattcattgtcttcacgcaaatgatttctttgggaaaccatcttgtttatgtatttacttattgtctgactcctccactgcaatgcaaggcccatgtctttctttctgttgtacccagtatcaactctccagtacctaaaatggttattatatctagacacttaggagctgcataaatatctactgaatatgtaaataaatatttgttgagtatttaatcaaataagattgtaattgtgaaaatttttttaaaataaaattttctataggtttttaaattttctgcttctatttaatcacaaccgtcctgaaaacaaaactggtcagtgaaaataacaacaacagtaagacattattacaaaaaactacttttgatataccaagcactgtgcttaccaactttattacatttaaccttcacaacaaccttaacttagagactataattagctccacttataaatgaagaagaaacaagattttgaaagttaacatattcaacatggcaaagaaatggtaaagttgggacttctaagctgtgctcttgactaccctattatacatctccacatggatataaattgatctacttttctagggtgaattcaactcttcaatttctataccatttggcaaacaccattctatattactgttgtgaaaagaatactacaagtaactaagataaattactcttattttaatttactctaacttcaaaagataatacaacaaagttcctatatcaaaatgatttcttacatcaggcatcaatttgttgttgctttacaattaaaactatattcaaatgcagtgtacatctcaaagacttctacattcctatagaataaagtaaatgccatctacaacagtacgctttattaaaattacatttccagagtagtaaggctagagccacaactgtagcagcacctgtatagattataaatgtcattgacacatatgtttatcgtttgcagttacttaagaggacaaaagtgttcttaatttaggaagttgttaaagactcctgtgtagggagaaggctaggaccaaactgttgttaaggcctctagatggcactctcctgttttcctttggtctccacacacaatttagtgcataagatgaccaaagctgaatggtgttcagttacaggcttgctttaaaacagattttttccaaggcaatttccttaaaagcaaacaacaataacaacaccaccaccacacacacaaccaaaccaaaaacagtaccataataattcctaattagaagatatatctagttcaatttcaggatcttgaaacctctattcagtcatccttaaccattatttggcctcagatgccttgaaaattctccaaaaaaaaaaaaaaatctgcacaagaatttatacacaagaccttgcatgtaactttagactactcaacgatgtcctatgaagcctgcatagatcccccagaccctggtgtctacaggccccagattaagaaccaaaacaattcttggttacagtgtcaagggcaagagctttttaatcttgactatcctacataatatcgaacgtgccaaggaacagaaatttaacatttttcatatgtggtgcagatggaaaatatgacaaaatgcagaaagctagagtatcatcatcaattcatatttcctaagtgtcatgtagttcatgaaattaaattcagatgagatttgaagacaccattctacataaaacatggaaacagggtgaaaacgaggggaatagatgctctcaaacctaagaacacaatcacccacaggacattcaatttacaagcatggaaagatggagccctcacattaaacaaaacatcaacttttccagataccaagaactactctattttattgtctaaaaggtccctgttggccaggcatggtggctcacgtctgtaatcccagcactttgggaagctgaggtgggcagattgcttgaggctaggagttcgagaccagcctggccaacatggtaaaaccctgtttctactaaaaatacaaaaattagctgggtgtggtggtacacacctgtaatcccagctacccgggaggctgaggtaggagaatggcgtgaacctgggaggcggagcttgcagtgagccgagatcgcaccactgcactccagcctgggcgacagagcgagactccgtctctaaaaaaataaataaataaaataaataaataaataaaaaataaaagggccccattatttgctcccacccaaaaggcagggcctctgatgctaaatgaaactgaaccactttgggcaatgcaagaatatgctcctctgcttgtgtgtgtgccagagaagcagcttcccttcagagctgctttcatctgctccatgcaagacgccaagcggtctccgcagtgagagtcactgtgggcccaggaaacctgatctgccaacagaacgttaactagaggatgttcagcacaggccttgccctgctgcgctgccaggcatttggatgactttgtggggagagagctgctgtatgggcagggtcctaaaatgagaattaagttgacattgccagtgtgagtccgtatctgtgaaagcaacattttttttctttttttttgtccttgataataaaacaaatttctctaagtggttacaacaaaccaaaacaattcttgggagataagtcttctccataagccgtgtggatttgactgaaaatagtaatgtccctttggcataccaagagagcaaaaatgagagaaagatacatagaaaagagtaaaaaaaatagggaagaagagaatgaaagactaatagagcaattcattcaacaatattatttaatcattactaacatttattgaccatttacatgataggcaaagtgctaaaccctttaagttaatttaagcatctacttcacaaaccaacccaatactattatctcaattttatagacaaagagaatttaaaatcagagaagttgagaaacttgatcagataataagaggccaaagcagaattctggtcagtcttactccagggagctcttaacctacatggtacctaaaataaacacattattggtattctgggttatgaaaacaaaccaaaacaattctctcctctggcagatcagatgccatgtcatcttcacaggttccatcatgacagaatcacccacaagctaggttagtacaaaatgggccaggcaaatagatggtgcaaagaccaagaactagctttaaggggagacggcaagttggatggattaatgaggcagggacatgagaacactaaatggggagcgttgtcttattcataattttgctggtgaggattaaatacactgtggtagagcaaacttatttatatactctagttgttgcaaggtgatgaagactatgatggaaggcttgaaacagaaggcttcccgaatcaaggatcaaagataagaggagataggtaaaaatttaaggaaccagatcatcagactcttcaggctgatcctatgaaggagggaaagccatttgtccctgaaaccctgcatgtgacaccaaagaacagaacatggcaaaacaatcctttccagctctgtggtgagcaatggcatagaagaaactgagtcatggattctttctgaccacataaagctgctttgagctggtggaaacagaagacatctgtgtaccagaaggcacagaaaggctttcttgcaggcaagaaagtgcatgctgcttacaggtgctcagaagaaggggatgatctagtttcttatgtacttggtccagtcaatggtaggtgtgttcaaaggtaattctaaagcacccagcccaagagttctatattttcaataatttaaacaaacttcttaaaaatgtttacttcttagtaatgaattgcttctggcacaattctcacttcaaagagggttctattttttctaaatttcaaaatctaaaaaggaaacaaaaataaattggcgattaaatctctgaaacatgtttctatggaaaatgaattacttgacaaaaaccttttaaaagttaaatgacattaaagtcttaaagttttcagaacaaggatgctatgcaatacactgcttgatgctgttatccactcactttgtccagctcgggtaccagccctgggggagaagtgatgctattatagcaaacagaacaagaccaatggatggcctgcaacagcaatctcaggatggagccacatggctttgataagagtctatccctgtattttagatgttctggatttaaaaaatgtttgtctcagagcacctctttaatgctgcctgccttttcctaaaagacaaactgcacacaaaacatgctgtttttcctcatgaaaagaaaataaagtctgttataatgtcctgatcttgttataacatggacagaacagtgtgactatcttgcagtgctatgatccctgcagaaataattaaaaagtaaatcaataagaaaccaggggtgttttctgccaagataccttcttttgctaagaagccagccagagttaggaatcttcactctgcttgtggactaagccctaaaaatgatgttttattaatacgctcaagaaacactgtcaatgtcaactgccagctaagatcaaacctatttatttaacatagtcactatttaaaaatgtaaacaaatagacaaatggtcctcaaaataagacatttgggcccggcatggtggctcacgcctataatcccagcactctgggagcccgagacaggcagatcacttgaggccaggagttcaagaccagcctggccaacatggtgaaacacagtctctactaaaaatacaaaaattagccaggcatggtggcgtgtgcctgtaattccagctactcaggaggctgaggcaggagaatcacttgaacccgggaggcagaggttgcagtgagccgagattgtgccactgcattccagcctgggtgacagagtgagactctgtcttaaaaaaaaaaaatgacatttgtatatataaataacatacagtaaatgtgctaacctatagatacattcagagattgtataaatgttaactataataatacaaaatacagggattttgttgttgcactgaaattttgttattttgggtactgctagaacaatggtgttataaggattggaatgcttttattctatacattaaattttgacatattactgctataatagaaataaacatttctaaataccaagttaaaggactagttatttatttttattttgaaatggagtctcattctgttggccaggctgggtgcaatcatagctcactgtagcctcgaacccctgggctcaagtgatcctcctgcctcagcttctccagtagctgagactacaggcacacaccaccacatctggcttttttttttttttttttgatggagtctcgctctgtcgcccaggatggagtgtagcagtgcgatctcggctcactgcaacctcgcctcccgggttcaaatgattatcctgcctcataaacgataatatgcctcctgagttgctgggactacaggtgcatgccaccacgcccagctaattttttgtatttttagtagaggtggggtttcaccgtgttagccaggatggtcttgatctcctgacctcgtgatctgcccatctcggcctcccaaagtgacatctggctattttttttatttttattttttagagacagggtcttgctatgttgcccaggctggccaccttgatctcccggcctcaaacaatcttcccatctcagcctcctgagttgttgggattacaggtgcatgccaccaagcctgacaaggatgtagtcaatgccacagttttacacaaacaaagaaaatacacaaccttggaacttaacctatgacagcactgactgcagtaagatccgactcataaaaaataagcattgagattagcttctcttgacacaatggcactaagaaaaaactgtcatgttttgaaacatttattttcagttgctcgggggaagaaaaatggaagtcccacacttcagtaaaatttcaaaaatgatattccaacagtaagatatcagaaaagaaggtggagaattatccatttaactataaattccaaccctagtggtttctgcaaattattgtaatcagaatatcctggaatagaaataaagttctttatatctctaaattctgtgagacactttcagtgactgaacatagaggccatagggagatggcctggaacactttcgcaaagagatggagcccataagaaaagtttctttaggaatcaataaacatgcactgagaggcttttctcttcagttttaccaagtttatcaacccgagacagaccacaaagaaaaggttttgacccatgtatatccatttattagaaaaatgacacctatttcttgaacttccttactttcgatcagtttttctaggtgggcatgatgctgccagaattaaaattcagaaatcaggaaatcctggcctaaagggtagggatgccaagatttagctctagcccaaccctgaaaagatcctggcttgctatactgttttacaggaggctgtccatcttgtggtttacattctagtatcttttgactcctagtatcagtcattacagtttaagaaaattctgcctccaggtccaatacagagttcctgctactcgtttttcagtaagtaatcccgatgcagacaaatatatccattctatgactctcttgattcttggactaacttactatgtatttattgagaatgaaaatacaaacacatatggttagatggtctctgaagccagactgcctgggttcaaatctcagctttgccacttactagatgtgcatcttgggcatgttacttaaccttatcatgcctcagttttcttatttatcaaataacctctcatacagtttacctcataaaacagcttacctcagacagttgttctgaacattaaataaggtaatgcaacagtgcctggtacatagaaagtggtcaataaatgttgactattatccatatctctgaagtccttccacttggaatgtccttcttttatttttctatttagggttgccataagccaggagacagctggtttgaaaaggctaataataaatagggcagtaccactatttatctactggtttttagttatgttaggtcatgggaatgaacacggctggcctgtttcactctgaagtagttcttaacctcttttctgacatcagctgtgatttctacattcactgacatgaaagcactacatagatttttctctctggcggtgcagtgtgtctcaaaaggtatgagaaaactgctttgaggactctgagcccctcggtatatggagacttggtgggtgagccaatttaatcccttgccccattggttctaaacaaagtgcttttagccaagcaagatgctgtgtggttcttgatgagtaagcctatcagggcagagttgtttgcctctaagtagaagctttttggcagtagctgcaggttacattctccatcagaagcattatgtaagcctgggttttgcgttcccagtaataaaatgctcatgcagtattacaattaattaagtcacaatgaagtctaatcaataaagactcaaaaatattgtccacaagagatctctatgccttcactaacgctgcagttttttcactgtaaattaattttccttcagttaaataaacgatcttagtatgtctgctagcaggtggtacaacaggggaatagggtaaactaggctttaagtatgttgttaaaaaaatatattgaatgaatctggtgctcaaaaaatttaagttatttgcatccatcggtggaagggcagatcagaggaaatatttgccaacacatgaagccaggccaggtttcaccttccacaacagctcaagaaaacagcaagtttcaacttttaatccttctataatttagactcagggttttatcaaactgctctttgggatgctctgagaagtttaatccaaaaacactggcctggatcaaacttattttacttaaggaataggaagcaaactctacagtagatcaaaacacccttttacacctaaaagtcatttgacttggtcaccttcacaataactcatataacaaaactacataaaaccatggctgggcgtgatggctcacgcctatgatcccagcattttgggaggcagagccaggcggattgcttgaacctaggagttcaagaccagcctgggcaacatgatgaaaatcttgtctctacactaaaaaaaaaaaaaaaaaaaaagtatataaaaccaagtggtttgatgaataaataatttagatcatgttaataatataatacaagagtctggcagggcacggtggctcacgtctgtaatcccagcactttgggaagccgaggcgggcagatcacttgaggccaggagttcaagaccagcctggccaacatgacgagaccccgtctccactaaaaatacaaaaattagctgggtgtggtggcacgcacctgtagtcccagccacccaggaggctgaggcaagagaatcacttgaacccaggaggcggaagttgccgtgagctgaggtcgcaccactgcactccagcctgggcggcaaaatctgtctcccaaaaaaaaaaaaaaacaagagtctgatataagattccatagttaagtagtgatgactcagtttttcattcaaaaacacttactgaatgcttatgtcttaccaggggctgtcaggttttatggaaggtattgagtgtaaaacacagctctgataatcaagaggcttacattctagtggggagaggaggaagacacatacataattataaaaactaggtggtatacaatcaacctagcctcaaataaatcctcttttaaatgtatgccactgtcattccaacttgaaaatatatgtctttagtacatctcaggatgcctatgaaaggaaacttgtgtcaaacaaacaacaccaggcatagaaatatacatgaattgtgaggatacttcattccacacattactgacaatagagagcagcttagaattcttgagctaactatatccatttgcagagcatggcctcccacacagctgtatgtagctactctggaattcaacttggctagaagcagctacatggtagaggctttgccctctggtcttccaagtgatcatttagaacactataccagctctgctggagtttctagacccttcaggaagaaaaacagataaactcagctcaagcctatgacaacagctgagaaaaggaaggatcttgtgcataaggaattctctcaatcacgctatctcccgtaatacagcaatagcagctggcctcacaggctgaaaagcagccagcactcgcctccatcagaagactatgctccaggtctactgagatacaactgtgcccagaaacacgaggcgtaagcagaaaaaggactctgggacagactctaaacttccttcacctgacactttctggtacttgaaggttgtctaagctaagaaaagcctaaataaccgatgaattcattttctgctatgccttatccttttgaagtattctctaatgggccttgggatttaggcctatgacattcagcaatgccaagcacatgtatattaccaagggccagagagatcatattggtaatatagcaagtatctactgacttcctaccctggttgtttctcattctctgtactaatcatacaaaaacttgtattgctacttagggaattatttaactgggattaaagagcgactacgtttaggataatcctgttggctttctctgagtcttgaagctttcaggttaactaacatcatattacaaataatagttctaagcagttagactgttagtttatttctaagcactaatagacagtgtggctgacagcatgcttagctgttttctaggaccccctatctgaagccggctccgggaagggttcagtaagaatctcttgccatggtgtgaggtgatgggggtggaggatagaaaagatccaagttgctcacaggaaacactgtggacattggaaaagtaaaggaagtggtttatcttgctctttttgcaacagtatggtgtagtaaaacaaacactaaatttgaatactgacctagttacttattacctgtgtggctttggcaagttaactcatttctctaaacttcagcttccaaaacttcatcagcaagatgataaaatatgtgctattacctattctaaaatatagttatgtagctcaaattagattaagtaaaagaaaataatttaggttgcgtatgctggcttctgcccataatcccagcactctgggaggccaaggtgggaggattgcttgaggccaagagttcaagaccagactgggcaatgtagtgagactcatctctacaaaaaatcttttaaaaaattagcttggaatggtggcacaggcctatagtcctagctactttggagcctgaggtaggagggttgtttgaacccaggagtttgaggctacagtgagctatggtcataccactaggctctagcttaggtgacagagcaagaccctgtcgccaaaaatataaaaactgaaaaattgaaatatttttaaaaaatatattggctgggtgcagtggctcacacctgtaatcccaaaactttgggaggccgtggtgggcggactgcttgagtccaggagttcaagaccagcctgggcaacataataagatcccatctctacaaaaaaatacaaaaattaggtgggcgtggtggcgtgcgcctgtagaccaagctactcaggaggctgaggtgggaggatggcttgggcccaggaggcggaggctgcagtgagccaagatcacgccactgcactccagcctgggcgacagagatcctgtctcaaaaaataaacctattaaaaaagaaattattttataaactcaaaagccctaaacaaatgtaattatttgatattactactgatattatgatttggataagactactctccagaggggcttttggagtcagtgttcgaacaaccctatgcattaattcattcaacaaatatttactgagtgcctactagaactcaggcaccgtccaaagccctgggaacataacagtaaacaaaaaccaaatgcttattatggtcaagtggtgataggaggtgaggagacaataaagtaagtgctatgaagaaaaagcagaattacagaaagagaatgatgggggtagccaggacaggcctctctgaggggacctatgactcctctctgaggggaatgtatgtgtttggcaagtctgagaaacagcaaggaaggccctgtgactggagctcagaaccggaggtgaacagtaacaggaaatgagaccaaagaaggggcaatgacagctgtgccttgtaggccatagtaataatgactccttgaattttattctgaatgtaaacaaatgccactggggatggggtggttctgattcagatttcatatttactaagtcctactacacaccagatcctgtggtaggttattgacagttgtgaaaaagacatgtttcgtctgtactttcactaagttcagtctggtgtggaagacatacaatgaaagaagtagttacaatataaagcttggtaagcaccacgataagagaaagtttagagacatgaagagtgaatagaaattatctagattcttatttctatccaatctaattttttttattctgaattctagaatacaggagtgggtggagtggggtgggatagggaagatgtattctcggcagtgggaaatgctccagaaaacagaacttgttcagggaacgagaagaaaattagggtgactggtgggagagtgggagctggggctgaagagctaggcaggagtcaggttataaaggtatttctatgtcattgtttctgaaatagcagataggagatcaatttagtaagtcgaaatcagcattttttaaaatggaatagaataaaatatattgaaatgcactgtacatagtaaggtaagttttgcttttttaaaaaaattgtttgctggctgggcgcagtggctcatggaggtcaaggagggaggatcgcttaaggttaggaattcaagaccagcttggtcaacagagagagagtccatctctataaaaaaatgtttaaaaattagacgggcatgatggtgcttggtgcttgcctgtagtcccagctacttgggaggctgaggtgggaggactgcctgagcccaggaactggagattgcaggaagctatgatcacatcactgcactccagcctgggtgacagagcgagactccgtctcaaaaaaaagtcttttgttttcagtcatggtggtatacgcctctagtctcagctacttgggagactgaggcaggagggtcacttgaacccaggagttcgagttcagtctggacaaaatagcaagaccccatctctaaatcaagcaaacaaagcttttgttcatttgtatctatatatgcgtgttctgggtcacagtataaaatgtacttttttcttatcatagccaaaaatgtttgtaagccaatgctttgccaccttatggagtaaactttaccttagaggcaatggtaaaccactgaaaagtttcaggctagaaaatgatataatcagatttgtgtgtttaagtaagagagagagaaagagagagaaaatgtacgtgtatgtgtgtgtgtggtatgttttatttatttatatgtttgtgttctggaaagattagtcatgtagcaaagttgacaatagattagagggggacaagactggagccaggaatccatataattggctattgtttaattgaggcaagggaagatgatagtatggtcttagaagtgcctacatgaatggagggttgaattgacaggatttggtaactgatcagctgtggcactggtgagagaggaaacatcaaggcttgtgctggccttggtcagatggtgatgctattcactaaggcagcaaatacagaatagagcaaatctagggagggggaagtcaagttcatttctgaatatgtctccattgatctgacttcaatacatgaaagtgaagataatggttagcaaatacttggatatgtcgccctagatcgagaggtctgggacaaaaagttaactgaggactgatcaccacagtgatcagtgaagctacagcagtaaataacatggctccagaaagatgttgtaaagatgaaaagatctaaaggatgagcagagaaaaataagtctggtagagaagatggagaaggtgcttccagaggacaggaggaaaactggagaatatggcgtgtcagaagcaatgagaaaaagtgttttaaaatgtaatgagtgactcaacaataagaaaataaaacaacctgaagttaaaaacgaccaatagacctgaagagacacctcaacaaagatatatagatggcaaataagcataagaaaagatgctcatcctcatacatcattagagaattaaaaattaaaacaacaatgaaatatcactatatacctattagagtggccaaaatccaaaatgctgacaccaccaaatgctgacaaggatgtggcgcagcagaagctctcactcattgctggcaggaatgcaaaatagcatagccactttggaagacagtttggcagtttcctacaaaactatccatgctcttaccatatgatccaggaattgtgctccttagtgtttaaccaaatgaattaaaaatttatgtccacacaaaaacctgcacaaagatgttacagtagctttattcataattgtcaaaatttggaagcaaccaagtcatccgtaggtgaaaggataaagggtggtacatccaggcaaggaaatattattcagtgctaaaaagaaacgggctctcaagccatgaagagacatggaggaaccttattgcatattactatttgaaaaacaccaatctgaaaaggctgcatcctgtatgtttctacccatatgacattctggaaaaggaaaaacttgtggagacagtgaaaggatcagtagttgcagggggttagggagaaatggataaacaggcagagcacagaggatttgggggcagtgaaacaattttatatgtattatagtggtgaatacatgtcactatacatttaccaaaacccacagaatgtgtaacactgagagaaaacccaaatgtaagctatggactttgggtgataatgtgtcaatgcatgttcattgattgtaacaaacataccactctggtggggcacattgattatgacaggggtcagcaggggagggaggcaggacagcacagagggtacatgcaaactgtgtaccttccactcaatactgctgtgaatctaaagctgctctaacatataactctaaagagacagggcacagtagctcacaccaatagtcccagcactttgggaggccaaggcaggcagatcgcctgaactcaagagtttgagatcagcctggacaacatggcaaaaccccatctctaccaaaaaaaaaaattagtcaggcatagtggtgtgtgcctgcagctccagctatttgggaggctaagggaggatcacttgagcctgggaggtccagctgcagtgagccacgatcacaccactgcattccaacctgagcaacagagcaagacccagtcccaaaaaagggagttagggaggaagggaggaaaggagagagggagggagggcaagggtgaagtgttaatcactgctgggcagtgattaagaaaaagactaaggatatgcagttgatcaataacgagatcactggtgaccctggccagagcaatactggaccacttctctgcttccttttatagtaaactggaaagagcgtgtcgtctattttccttctattccttttttgttgcaaccacatgattaagcttttgctcctgttcctctgccaaaagtgtacttcagaatcattaatgatctaggaaggtgagggtgtggggggataaaaaagaaacaaaatcattaacgatctccacatttctaaatgcaacattcagttctcagtcctcttacctgacttggcagcagcattcactccccacagctcctcactccctcctccctcctcctgggaacagtctcttcacttgtctcctaggacagcaggccctctggcttacctcaccagcaactcttatgatacctcttcacctgcttgttctctaaatagcggtatgttccagagtttaattcatggacctcttctcttctctgtaaccactgcctaaaaagtgagctcacctcatggctttaactattatctatacactggggattccaaacatacatccccaacccagaattctctcctaaatgcgactgccaattcatatcttaactctgatgtctaatgtgcacctcaaacatgacatgtctaaaacatctctccaaaatgtaagtattcttccccagtcatccccatctcagttggcagtaaaaccatccttccatttgctcaggatagaaactctggagtctttctttcatatcaaatccaacactaaatgttattggagccaaaatacctgggttcaaattctacttcagccacttggtagcagtgttatcttgggaaaattgcctaatctctcctggcttcagttttatcaccagtaaaatggagacaataatcttgtgtatctcatagggttgttaaaataatgaagtgagttaatgtttgtgaagtgctttgaacagtgcctgccacacatggtaggtagcatctcttgaatctgatcacttcttaccatctccatctcgacaccccagactgggaaccagccaccaacatctcttatctggactattgtaaaagtctcctcctaactggtgtccctccttcagcctttgtaccttttagcctaccggcaacatagcagccaaagtgatcttttttaaacaaaagtcactgcaaaatttttcaatttttttgtatgtttgaaatttttcatcataaaatttggaaaaaataaaactcagattacatcactcctgtcaaaaccctccaatcctgtatacttcagtcacagtaaaatctaaagtctttacattaactaggccctaaaattaagctccctcttacctctctgacctcatctctcttcctcatctctcaccgctccttccttccaggcacgcaggcctccttcccgttccttcacatgcagccatgctccatccccgcggcctctgcgctgacccctcaacagccagggggtgctcttccccggactgcacagcattcaccctcaccttctttcaggctttgctgaaaggtccctttctccatgaaggggttttcatgtaacttaccaaccactatcctaactccttctctattttatttgtcccacagcatttagcactatcttctacactatgacgttatcagttcaaaggagccaagttaaatctactccaaggttcacctctttgttctaaaatgcaattaccatgggcttctaccttgttgtcaacccagtggacacatgttcttccttaaaatgaaaacagatgattaagcaaaactatatgactttttgcgttctctaaaatgttcccttcttatgtgcaaataaatggtgataaaatactgttaattctgagtatcttgtatctattttcggtgttaaatttttccaagacctgcctaccttactgcccactcgttaaataaaattttttaaatttgattctggaggacaaagagcacagaaataggaaatgaagcagtagcaagactaagatgcaaagcctactttatccttggcatttaaaaccacattgcaatgagaacccaataagtggaaatatcctgaaaaagggtaggaagacagaagtgaaacaaaagcatttattgcattactgctatgccatgggcctactgagtcttcacatacattatctcatttaatccttacagtaatagcagccctcacaaaactctcagccaatttatagatgaggacactaaagctgagacagacttagggcccagattcaaacccaagtagggctctctgatgccaaaacctatatactgtttctacagaaccttgcctcctggaggcatcaggtcagcaagctggagttaaaaaaggttgtaagtgggccatttatactccatcactaaattcctgggataactgagtgggtctaactttcatgaacccattcatagctgtgtgctagcgactcccttacctgtggacataaaaaatgggatgcggaactttccactcagcacgcgggcccgcagattctgcagtgtgcttccatcaaatggcagggcaccgcacacaagcacgtagaggacaactccaaggctctgcatcccaaacagagaggatgtacaattaatcacatcaggggaaacaaaaaagactactgtagtgtgtgtatgcagatgatggtgagtcatgcatacgattatggaacaaactttttcttccatcttagaacagttaacaatcttctttgcttctaggcattaatttagggtaacatcctgaatttttctcagtactcattctctggggataaggtaagtggccacagtagaaataatctctcttcttggcaacggcccccatccaagctggcccttgggcttcttttgcaaatgcaaaggggaaatttgaaatatgtggctcagtccacaaggtaagtattggaggaaagattttgcacgagtaggccgggtgcagtggctcatgcctataatcccagcattttgggaggccaaggcgggaggatcacctgaggtcaggagtttgagaccagcctggccaacatggtgaaaccctgtctctattaaaaatacaaaaaattagccaagtgtggtggcttgtgcctgtaatcccaactacttgtgaggctgaggcaggagaatcacttgaacctgggaggtggaggttgcagtgtgccaagatcatcctgctgctctccagcctgggcgacagagtgagactctgtttcaaaaaaaaaaaaaaaaaaaggctttgcacaggaattgggacttgaaagaacaggtgaccaggatctcaattcatgttgcatcattatgtatccttcaggatgcgaatagctgtcatcaaccaagggtagctaatgctgtggggtataagagaaggcagttacttacccagatgtccactttgggcccatcatattcttttccttcaaagagttcaggtgcagcatagggagggctgccacaccaggtcttcagcagctgcccaggagtgaagaggttactgaaaccaaaatctagaaaggcaaatggacataattcgtattattgtaaccttttattataactgagcaaacactagtctctagtcactaaagattccaaatcattgtctgaatattaaatgcaaaaagagaacatttagaaaccacatagccagacacttaaaacaataatagtgaaacagagatatagatgagctgaaatataaacatgatcagtttatgtcagcaaaaatagtactgctcccttcataaacctaggcagaataaagcgagtggtacttgttcctttaagaatgcaaatgggcctgggggcagtggctcatgcctgtaatcccatcactttgtgaggccgaggtgggcggatcacgaggtcaggagatcattctgaccaacatgttgaaacctcctctccaccaacatacaaaaaattagccgggcgtggtggcgtgcgcctgtagtcccaggtactcgggaggctgaggcaggggaattgcttgaacctgggaggcagagattacagggagccaagatggcgccactgcactccagcctgggcgacagagcaagactccgtctccaaaaaaaaaaaagaatgcaaatgaaactggatgatgttaagaccacattagaatcaggaaacacatgtaagcctactcagctggacccagaatttttttttttattatactttaagttttagggtacatgtgcacaatgtgcaggttagttacatatgtatacatgtgccatgctggtgcgctgcacccactaactcgtcatctagcattaggtatatctcccaatgctatccctcccccgtccccccaccccacaacagtccccagagtgtgatgttccccttcctgtgtccatgtgttctcattgttcaattcccacctatgagtgagaacatgcgatgtttggttttttgttcttgcgatagtttactgagaatgatgatttccaatttcatccatgtccctacaaaggacatgaactcatcattttctatggctgcatagtattccatggtgtatatgtgacacattttcttaatccagtctatcattgttggacatttgggttggttccaagtctttgctattgtgaatagtgccgcaataaacatacgtgtgcatgtgtctttatagcaacatgatttatagtcctttgggtatatacccagtaatgggatggctgggtcaaatggtatttctagttctagatccctgaggaatcaccacactgacttccacaatggtggaactagtttacagtcccaccaacagtgtaaaagtgttcctatttctccacatcctctccagcacctgttgtttcctgactttttaatgattgccattctaactggtgtgagatggtatctcattgtggttttgatttgcatttctctgatggccagtgatggtgagcattttttcatgtgttttttggctgcataaatgtcttcttttgagaagtgtctgttcatgtcctttgcccactttttgatggtgttgtttttttcttgtaaatttgtttgagttcattgtagattctggatattagccctttgtcagatgagtaggttgcgaaaattttctcccattttgtaggttgcctgttcactctcatggtagtttcttttgctgtgcagaagctctttagtttaattagatcccacttgtcaattttggcttttgttgccattgcttttggtgttttagacatgaagtccttgcccatgcctatgtcctgaatggtaatgcctaggttttcttctagggtttttatggttttaggtctaaggtttaggtctttaatccatcgtgaattgatttttgtgtaaggtgtaaggaagggatccagtttcagctttctacatatggctagccagttttcccagcaccatttattaaatagggaatcctttccccattgcttgtttttctcaggtttgtcaaagatcagatagttgtagatatgcagcgttatttctgagggctctgttctgttccattgatctatatctctgttttggtaccagtaccatgctgttttggttactgtagccttgtagtatagttcgaagtcaggtagtgtgatgcctccagctttgttcttttggcttggacccagaatttttatgttatatttacttcttatgacaaacacatctatgaccatttaaaaattagacaaagtgacattattataattaagtagtttattcaaaaggaagaatatgcaacttatttacaaactgaagcaagaatgcttacattttaattttaactctccttgtgcttcaattttcctcccttcttctctccctctcctactgctacaagacgcagcagatgggaggtagcagggatgagtcttcaggagctacactaagacaatgagcaaggatggctggccaaaggattgagtctctggtgtagaaatgcttttatttatgtatgtgtacccatgtgacaggctagaaatccctcatgccccagggacaccatgctccctgaaatcacagcatctgaaaatgttaagcacccacctactctctgaaacccgtccctctcttttccagttttactcttgttgacaactctccttttgctatttgctttccttctttctaccttctacagaaggtgtttttcagcaggctctgctgattttaactgcctctccttgctctatgttttctcagggctaactcttttaatctcgctacttctaccagcatttgatataaataccccaaatttatatgtctggccctggtaccactcttaagttcttggcatgaatccccaatacttgcttgggaagaaacacctcaaacccaccattttccaaagtcatacctgcgctttcagtgcttttaccctcattagtgacatcaccacctgtgttactagaaacactggagtcatcttcaagtcctttctccctcgtttcccatttcaacctggtaataaaactcttactgcttcaactccatgtgtcttgactccacctcctcttttctatttccatttctaccactgcagttcatactcttatcatccctagcttgactgatgctattgcttacttcctatttcattttcccctaagctatccattcatagcacaaagttacacaaaccagatcctgttacctcctcgctcaaaaaacatgggctgcctcccttctacttacagaagagtcttcatctcagcattgtcatttaaggcccttcacaacccagctccatcctatgtttccaatttatccctggccatgctagcatcactagactattcacatcctgtgtttacatgccttccacatgctatttcctctctgtaccatgccttttcctttcttttccatctttaaagtatcactcattttcaaggcccagtcaaatattacttcctgtatgaaggcttaactgatttccaccagaaaacaccatgtcaatggcttcctcctccgtgcttccacagccttttgtttacgcctctacatcccattactgttctgtcatatacatatacatatatattatttattttttttttttttttgagacagagtttcactcttgttgcctaggctggagtgcagtggtgcgatcttggctcaccgcaacctccacctcccaggttcaagagattctcctgcctcagcctcccaggtagctgggattacaggcatgcatcaccatgcctggctaatttttgtatttttagtagagacggggtttctccatgttggtcaggctggtctcgaactcccgacatcaggtgatcagcccacctcggcctcccaaagtgctgggattacaggcgtaagccactgcgcccagcctctgccttatattatacttaattgtattgtgtgtttataccctccattaattagtaaatggaggagataccgttttatttatcctagtctctacacagtggttctaatacatagcagagactcaagaaagggtcacgaaattaaactgcaataaaataactgggccaatcctcttgtcacctcctgactactggagacttctcaaactgacaatggcagctggccagcaacgagagcctctgcctcctagctgtccctcccaaggttctaaaattaacttaatgatcataaggggtgtggcagtcaggaccacaaatagaatcattatagcttcttctatgagaagatgaatactctcattcattaatggaaataaataatacttcttctgtgaagtcctcctggatcccctacaagaaatgtcccctatctactctgtctgtactttctttccctttattatttgaatacataaataatgtattcttctagctcctgaaaaacatcctctcttgtaaagatctaccctctctctctagttccttaccttattcttctctctttcacagtatctaacagtgtttaacacagtgggcacttaatgttgactatgaacaaaactgcatttaatgctctaccaactaacctgcaacttttgaaacaccgtaactttcacttacaaattaaagtctgcacacactggtcactattaagatttttttcttaggagagtgggaacaggttgctaaaaatcccaacaactgagattcagcaaagttgacgtctctgggaattatccagaaggaagatccttaggtttgcaaaaataaaagacagaaaaaagatccttagatttgcaaaaaaccttcaccaggtccttttccatgatcagccttcctcttctctccagtgcagaggagaaatgcgaatgattctgttctgcctgatggattctggcactggaatgactggataacaaactctagaagaatcatggctagaagaatcatggagttttttgtttgtgttttcaatggagcatgcaacaggctaagcaatgaatttaaaccagttgagtttaaattcgcctataagcagataaaatgtacagacttctcattttgaaccactaatgtttagtaacctttctagcatgttactttgccagggaggtgaaggcacaaacctaatagtgtgagcttgttattttatctaccaaacaggaaactgttacaaagaaaacaatatcaaagggaaccagcttcagcaatgtctgcaggcttagactgctaatagttataaggattttatatgagaaatgagtgtatgagaatgaatgatatattacagccagacaactagagagagccacatctgcagaagcacctgcttccactatgttacatccaaacagctggcttcaacagctagacccaataaccaaatgcaagatttctgtaagattcaacaacaaccaaatactactggcttgctctcatctcctattatgcaccaaacaaaatcctctagtctcagaaacctgtcgagaggtcttctataatcattccaagtattgttactcccaactctaaggtgtacattcaagcaaaatcttgctattccctgcctacaagacaccttttaccccccaattatgggcagattcctttaattactgagcctgcggtatcctaattctttctttaacgtaccaaacctaacaggatctgatccactctcccttttcaatatacatattattataaattgacggtttcattgaaagcatatcgctgtcttctcttccctaccagtggctctttactagtatttcacattaatcttcactattgctatgcatcttgtaagttaaaattctgtctaatttgctgcccattcagctataacataacttattttctgaacatttaaattatccgtgtgggaaagcctcaaattattaccatgtactaaatctggaagtcattttgaaaattcagtgccttccaatcaatacttctgggactgagtaactgtgatgggagaatacctcctcttcattctcttagctgcttgcctttggggacattttgctgcacattttaagaggactggaaagaaaaatacagttaaaacaaactagtctattttaggttctgttgatagtttagtgatgtactaggggaatgctggggtgtgtggtaggaaatggaggtggggaacagatagacatggaacagaatcactaagagctttgctgttttcagttatctacatgtatagacaactggaaaaaattgaaagatcatccaagttggaggaaaaaaattctcataacacaaattcaagcaatgagtaaaaaagaatgaggaagaattccggg

SEQ ID NO: 28 - DNA, 247682 bp, Homo sapiens
  misc_feature 145329-145428, 187896-187995, 195894-195993: N = any nucleotide
gatcacttgaggccaggagttggagaccagcctggccaacacagtgaaatcctgtctctactaaaaatacacagaatcagccaggcgtggtggcgcatgcctgtaatcccagctactcaggaggctgaggcatgagaatctcttgaacctgggaggtggaagttgcagtgagccgagattgtgccactgtactccaatctgggcgacagagtgagactttgtctcaactttgaaaaaaaaaagagggagagacatggagggagagagggaggccaaggtgggtggatggcttgagcccaggaattcgaggccagtctgggcaatgtagtgggacctccatctctacaataaaatacaaaattagctgggtgtggtggcgtgagcccagatgctgccacggcactccagcctgagtgacagagcgagactctttctctgaagactaagtgtaatatggtatcctggatgggatcctgaaactgagaaagaacattaggtgaaaactaatatctgattaacatggattttagttgttaattatgaatatgttgatattggctcattaattttaacaaatgtaccataccagtgtaagatgttaataataggggaaattgttagtcgagtgtggtggcttgctcctgtagtcccagctacttgggaggctgaggcagaagaatcgctggaacccaggaggcggaggttgcagtgagccgagatggtgccactgcactccagcctgggtgacagagggagactccgtctcaaaaataataataataataataggggaaactgaatacaggataatgagaattctgtgtactatctttgccatttttctgtaaatctaaaactgttctacaaaataaagtttactaggcaaaatgggcaaaggatctgaatagatattcttccagagaagatatacaaatggataataagcatatgaaaggatggtcaacatcattagctatcagggaaatacaaatcaaaaccacagggaagtgggaggaaggtagatgggaagaagagataattatcaaagaatacaaagcttcagttagactggaggaatgcctttagtgatctattgcacagaacagtgactataaatagtaatacattgtatgtttcaaaattgctaaaagagtagattttatttaaaatctacaaaaaaaaagtgaggtgatggatttgttaattaacctgatttagtcatctcacatcgtcacattgtaccccataagtatatgcaattattattaatttaaaataaaatttagacaaaccacaatgaattactacttttcacccaacaggatagctataataaaaaaagataatgagtagaagaattatctttctacataaaatgtagaagaattggaacccttatacactcctggtagatatataaaatgctactctgcttttggaaaatagtttggcagtttttcaaaaggttaaatacagactcctaggtatataccaaagagaaacaaaaacttttgtctacacaaaaacttgtacacagatgttcatagcagcattattcgtagtagtcaaaaatagaaacaacctatatgtctgtcaatgatgattgtgtaaataaagtgtgatatatttatacaatggaattttattcagtgatgaaaatgaatgaagtactgatacaacctggaagacccttgaacacattgttaagtgaaagaagtaagtcagaaaagactatttattgtattgattttgcttatatgaaatgtccagaataggcaaatccatagaaaatagattcgtctttccaaaggttggtggatggttgggaagaaataaggggtaattgttaaaagggtactgtgtttctttttggggtaatgaaaaggttctaaagttgattgtggttatgtttggacaactgtgaatatactgaaaaccagggaattgtatgtactttaaaccagtcagttgtatggtatgtcgattatatcttaattaggctgttagagaaacaaaacaaaggaatgcaaagatacatgttaataggaaagatcttttgaaagaattcagtaaatttagtgggcgttttgatgttaccagtgtcagcattatgagtgcataaactatactaaataaaacaattaatgaattgagcactcatacagatcttttcttttggcctccaggtccctgagcagcagcctattactttgtgtagtggggttgaagacacaaagcattatgaggaagccaagaaatgtgtagaagaattagcattgtacttaaaaccgctcagcagtgctagaggtaagtttgtttttgtttcttatttaaagagtaaaactgcttttttaaatactcagtacataatcctatataagtcctgaggaattcccaaaaaacctaactagaggtaaatttgatgcaattatccatactaagtaaatgtctactaaagagacttgttaccataaaaattgtgagctattaagcaaatgttaatgaaatttatctattgtaaactaaactcattttgtgctaaatatcatgacacaaaccacatcaaataaaatagtgaatttttagtttatgtgatgatggaaacattattcgaatgatgataatagcaaatataactacttacttcagcagtgctttccatcatttgacaattctgaatggtttgccttctatccagttttatatgctatgctataggcggtataatgaatacggaagttgccattactgcacagaaagggcttgctatttaattaggaaaataaggttaaccactgtcaaataatataccagaactcttaggacttcaagatttacattataaactaattatcaatgttgtctagtccttttttctttcttcctctatgattaaaatgagtaatggtatatttaatgtcataatgaatgctaagtgcacatgagataactcatgtatacatttgtatactttaaaaatgtatacttaagtaagctttacatgtgtggttttatttgttgcttattttaaatactctagtagtcccagaactagtcacatacccacaagttaacccaacagaagaattgctcctggactgtaaaattgcattgtgaacctaggaataacttctttactcttttaaaggagtgggtctgaacagcactactcagagtgttctgagtcgcccaatgcagaggaagcttgtgactctagtccactgtcaactagtagaagaagaaggcaggattcgtgccatgagggcagctcgatctttaggtgaacgaacagttacagagctcattctccagcaccagaatcctcagcaactctcttccaatctttgggcagcagtaagggctaggggatgccagttccttggaccaggtacataattaactttaggtatttattctgctggtaattctaaaagtatgatgtaggaattataagtgatgtacaaagcctagttctttgcagtattttattgttaccaactaatatcttgtttgatgttcatggcttgggcaattccatgtaacttagtggacttactaggtgaacttagtgaacttaaaacttttctcttaatgccaaaagttgtttctttttttaattttttgatttttcctttttttcacacctgtagcaggaagttcattcattttgatagaagtttttcttaaatttattaatcactttatctgttttctttataaaatatatagaatgtaatacaaaattgctcacaaaaatggtgtaaaagtgtgttgctggttaatcttaactgtattgccagttaattgaatagctgcagaaatgattaaatattccccttctaataaatggatttatcttatctatgtacttgataaattttggttttgcccaactttccctagcaatgcaggaggaagctttaaagttggttctgctggccttagaagatggttctgctttgtcaagaaaagtattggttctgtttgtggtgcaaagattggagccacggtttcctcaagcctctaaaactagcattgggcatgttgttcagctcctttatagagcctcctgtttcaaggtatgaacctacattaaagctcagcttgaaaggaaatattgttctttccccaaagttaagtagtaaaactttgagtttaataaagttgcctgtatcttttcagaaaatctcagcaatttttctttattcttttaaagaatgtagatggggtcttattatagttaaatactattatattgaatttttgtatgttcaatattgaacaacatagatcaagtcaaggtttatagatttttgtatttgaagagactaagaaactatatcaatttcttaccaagactgtgcagaattggtctgaagagagagttattgaagcacaaataaattttatttatttatttttatttttttgagacaaagtcttgctgtcgcccaggctggagtgcagtgcatgatctcggctcactgcaacctccacctcctgcgttcaagcgattctcctgtctcagcctcccgagtagctgggattataggcagggccactgcacctggctactttttgtatttttggtagagacggggtttcgccatgttggccaggctggtctcgaactcctgacctcaggtgatctgcccgcctcagcctcccaaagtgctgggattacaagcgtgagccaccgcgcccagccaaataaattttattcagagattttctcctagtgtaattccacatatacaataatgaagttccatttgccatttcagtttatatggtaatgctggacatagtctcttatcccaaattgaataagcaccgcctcaaacattgctactcactatgtatcatttattgtacatccagtattatttttctgacttttttttttgagatgcagtcttgctctgtcgcccaggctggagtgcagtggtgtagtcttggctcactgcatcctctgccttctgggtcaagcaattctcctgcctccagccttctaatcataatcattatgattattctagtctagcatctcacactttacactttctggtagtagcccatcccacaaaactccatgaagaattaagccaagtacaaattaaatcatttttagaattacaccagcatctgaagctctacagtcatcagtcccacctagctcattgtcaggcaatcccaagagtcataatccacatttatggagaagaaacatattgtttttcagaatatagaattgtattagtatttttttcttttcaaaaatacatatacacacacatacaccttaaactgaatgtatatgttaaagtatgtcaaatctttggatttcattccagcacatacagattgactatacaaaaatccaaaatccaaaactttttgaacaccaacatgatgctcacatgctcattggggcatttcagattttcagagtaaggatgctcaagtggtttaatgcagatattctaaaatttgaaaaaatctgaaatctgataacacttctggcccaagcattttgggtaagagattctcagcctgtatttattctttctgaaagacctatccagaaaatgttggcctaaatccaacttgactcagaatgggatgatagcaatatacctacctcaacaagttaaggagaaaatattttgcaggcaaatggtatattcatttaatcttgctgttgatgctaaatttgttacattaaaaattatatgttcatataaagcataaactcatttttttgacttcattatgagattatttgtgtcttattaggtcaccaaacgtgatgaagactcttctttgatgcagctgaaagaagaatttagaacctatgaagctctgcggcgagaacatgactcccagatagtgcagattgctatggaagcaggcttacgaattgcaccggaccagtggtcctctttgctttatggagaccagtctcacaaatctcatatgcagtccattattgacaaggtaggaccttttttgttccttacttcttagactaatcttggcattttggtaattcatttaacaaatgtatattaaagtgaatactgtatagcttttgtaaattgtatttatagccagtgtcatgtcataaccaatcacgttataataccactttgttcatttaaagatttgattagtttatattttttattttacttattttatattttattgtatttttactagaatcacagagatgaaggccaactctagagaccactctacatttaatttagagaaatagagtcaaatagtaagagtaacctaaaaaaaaaataatgaacatttactaaaatcttaatatgtatctagtggttttaaataattcatttaatcctctcaacagccctgtattatccattttagacaaagacaaagggaagttaatatgtttttccagcatcacatagataataaatgacagaagtggatttgaacttgaccattctcagtgtagagtacactaaccttttaccagactattcccccccaccttttttttttttttttttttcctatttctaaagatagaattccttgaatgggtaatacagtgagaattgggaaatatgttttttaaatgcttggtgtagggtgggcacagtggctgatgcctgtaatctcagcactttgagaggccaaggtggggggattgcttgaggccaggagttcagtcacagcctgggaaacattgggacactcatctctaccaaaaaaaaaaaaaaatagccaggtgtggtggtaggcgcctatagtctcagctacctgggaggctatggtgggagaatcccttgagctcaggagtttgagggtgcagtgagctatgttagcacctcggcaacagagtgagaccctgtctctttaggggggataaaaaggcggtacataattttcagttacaatgtaggttgtttgctctgctctataagtcttccctggatacctttaaccagactttacctgcaactcttaggtttggacaggagcttgtatcggaagttttgcaactcatttataatttacggaaacgcttaacgcttagtaatgatctattagaggagtacctttctacctctgaagagaaacttggctttttttgtttgtttgtttgtttgagacagagtctcaccctgtcacccaggctggagtgcaatggcactatctcggctcactgcaatctctgtctcccaggttcaagcgattctcctgcctcagcctcccaagtagctgggattacaggcacgcactaccacaccctgtaccacgcccaaattttttgtatctttagtagagacggggtttcaccatgttggccaggctggtttcgaactcctgacatcgtcatctgcccaccacagcctcccaaagtgctaggattacaggcgtgagccactgtgcctggcctggcttggcttgtcttttataaagattctacaaggtggttaatcttgtctgaactgaactgtgtaactaggtgtatatcctacagtaattttctcatatcacacgcagtgctttaaatttaatatccagagacctttgcacaacaaactggtaaactttgcagtgtgtgtgatattttatagagcaatagaactttctgtaatcatgaaaatgttctgtgtatgcactgtccaatatggtgatcactagtcacacacggccattaagcatttgaaatgtgacttttgcaacggatgaactgaaatttttatttcatttaattaacttaaatttaaatagccacatattgccaaggtcaccatattggataatagaaaagagaatttattaaaagcgatgaggaaagcactaattctagtaaattaatggggagagaaacaggaattaacaattcacaaagaagactcatcagtatatctaattgatggtaggctgaattgagagaggtctcacatttgaagaatgtgacagcagaggcaatacagtacacaatgtgccaagctctggatgcagagaagtacagaatttatttgggtagcaagtaatctactctggccaaagtgtagggtatatgggaagataaaaattaaatttaataaatcgcaaaaatgattgtgatataaataatctttatatttaaaggattatctgacctttgggaaagttaacatttatcttttttaagttgcagactccagcctcttttgcacagagtgttcaggaactaacaattgctctccagcgaactggagacccagcaaacttgaaccgactaagaccccatttggagctgttagcaaacattgaccctagtccaggtaaacccacgggaaattaatggactatcttatatgtgcctttcgtgctgctcaatgattctttaattatcttttgttgttcctctagggtttcccaaagtagttactccagatcttttttacagtattttaagtttccattttaaatcttttccctctttatctcaggttagttcactttaatatttatttaatactttttatactgttgctcatttcatcaggaaaatagatttctctgggcttctttatgtttcttctttctcccgtcacaaaattgtgttgtattttaccattcttacctcttccaaatctcgtttttctcatttttttctgtattatgtatccttagttgcatttccttgatcctgtttttgccctctccatgatatcttgttccttcaagtatcctgtcttgtatatctttacttaggctttttctgctccttctccgtaacctgaaaatatacccaaccttcatttttcaacttgcacttacatctaagttattttagcttctctgtgtttattcctactactgatctgaagctctcttaatattcactagtagattcccagtctctgattccaaaagctttgtcttagtctttaaatcactcccatttgttttcagcatttcgataatgttgttgagcacttttttgatatctttctgtgatctcatagttctcttctgacctgagtgctacttctgtcttatttgtaccatgccttcccctcctgcccactaaagagtaggcaggttatgctcttggaattttgttttctctacatgctctgatggtggttattcattcttagcatcaggtattaccttagtgtagaatacagactcccaaatatctctatcactattatctctgcatcactccagatacatctcccagtgcttgctgagattccccatcgtgtcctctgagtgcttcaaagcaagctcatcatttcttgatacttgctcttcctttaatgtttcctctttctgataatgacctcattctctgaggtatgtaagtttaaaaccttaatgttttgtcttgtctcatcttttcctttcacttgttctacatactgtttcatacaatgggatttatctgttcttctttcacaatacccctatatcccctgcttataattaattcctttgagagcctcctttttcctgagactgaatgtcttccaagttcctctactatgagttcctccaatccagtctacttactgctgtaaaagaaatcacatccctggcctgacacagtggcttacgcctgtaatcccagcactttgggaggccgaggcgggcggatcacgaggtcaggagatcgagaccatcctggccagcacgatgaaaccccgtctctactaaaaatacaaaaaaaattagctgggcatggtggcgggcgcctgtagtcccagctactcgggaggctgaggcaggagagtggtgtgaacccgggcggcagagtttgcagtgagccgagactgcaccactgcactccagcctgggcaacagagcgagactccgtctcaaaaaaaaaaaaaaaaagaaatcacatccctgatcttccttccacactcataaactttcattgtttgtagaattgcttacggaataaggtttgacactcttgactatggcattcagagccctcttagttttttatcagcctacttttatagatttgctcccaaaattgcttagtaaaccagatcaatgttactagaatatatagtgatttttttccctgactgctgtcctttgatcatcctgagcagtcaaaagagaactttcacaagttcctaaaccatttttgaccccatttctcatctacctaccacttcatttctttttttggcacactcttgaactcaactccagtcaggcatttatctccactgctctatccaaacttattttgtcaaggtcataaattacttccatgtagctaattccaaaagtcagttctcagttcttactgtacttgatttagcagcatttaactttttttttttttttggagatacagtttcactctgtcccccaggctggaggcaatggcaagatctcggttcactgcaacctctgcctggttcaagcaattcttgtcccgagtagctaggattacaggcttgtaccaccacatccagctaatttattattcttattattcttattatttatttttagtatctttagtagaaacagggtttcaccatcttggccaggctgttctcaaactcctgaactcaggtgacccgcctgcctcagcctcccaaagtgctaggattacaggcatgagccaccatgcctggccattgttctgtactctctcttccttgaaatgcttttttcttggcttctaggctactaattctcttctttattggactctcctcagcatcctctgctttctcatcttcatatcctgtactctttggagtgttctcagagtttaatcctatatctgtttcctagataatcttatctatcccatagcttcaaatataatttatgtaactcacaaatttactgtatttttttttttttttttttttttttttttttttttttgagacggagtctcgctctgtcgcccaggctggagtgcagtggcgggatctcggctcactgcaagctccgcctcccgggttcacgccattctcctgcctcagcctcccaagtagctgggactacaggcgcccgccactacgcccggctaattttttgtatttttagtagagacggggtttcaccttgttagccaggatggtctcgatctcctgacctcgtgatccgcccgcctcggcctcccaaagtgctgggattacaggcgtgagccaccgcgcccggccaaatttactgtatttttatcagttctgaggttcataattatttcagatcttagcatttctgaaattggaatgcatttgtatgaagacatattataattaacaaccttttttttctttgttggcacataaagtagtacgtattacaattgatagtcttttagaatttgaaatatatatccagcccatgcctttttcctgaacttgtatataaaactgctttctcggccgggtgcagtggctcacgcctgtaatcccagcactttgggaggccaaggcgggcggatcacaaggtcaagagatcaagaccatcctggccaacatggtgaaaccccgtctctactaaaaatacaaaaactagctgggcgtggtggcaggcacctgtagtcccagctacttgggaggctgagacaggagaattgcttgaacccggaagatggaggttgcagtgagcagagatcatgccactgcactccagcctgatgacagagcgagactccatcaaaaaaacaaaacaaaactgctttctcagcatctatcatcttatatctgataagcatttcaaactgaatctatctaaaaatgagctctcccctgccatcctgtttgtggcaactctgtcattccagttgcttagtccaaaaacctcttctttctctcataatgtatatctgatccattagcaaattctgtaggccctacctttaaaatccatccagaatccatttaccttcactgctaccatccccatctctcaggggattatggaatagcctcctgttgtctgtctgattttaacaaaagagccggagcgaccctgtcaccctctgctcataaattctcctgtggctttctatcaactcagagtaaaacccagtatccttcccatgatctatagggcctcatgtgatctggtcttctactacctctctcaaacctcatttcctaccctttttttccacttaattccctcctctctgattccacctccatgcaacatgccaggcacacttcttacatcaaggactttgcacttattcttccctctaacttggatgtttttcccttggtatattattctgcatgtcaagaagaattagttacagaatattctttgattatagggccttttgtagtttttgtggtgtgttgtatggaaacatacatatagctgtattgaacattgtacaaaacaaatattagaagataatttatatatttgaaagtctccagtaggcacacttaaacccttctttcaggtctttaatcaaatgtaaccttctcaaggaggacttttctggcctctgtctaaatttttttttttttttttttttttttttttgagacagtctccctctattgaccaggctggagtgcagtggtgcaatctcagctcactgcaacctccgcctcccaggttgaagtgattctcctaccttggcttccggagtagctgggactacaggcgtgtgccaccatgcccagctaatttttttgtatttttagtagagcgcagtggctcatgcctgtaatcccagcactttggaaggccaagatgggtggattgcctctgtctaaaattttacacattggccccacttctcttcttagctctattttttgaattcaacattatctaaatactactgtatattttgcttatttgtcttggttattatctggctcttctccttgaatataatggggatttttgttttaatcactattgcttacccaacaactagaacaataactcagatttagcaagtgttccaaaaactacttttttgaatacttgttttcttcaccttttttccttttcagattccatgtgtccttcaaagcccagttcaaatgccatcccctagaattctttcagggtgtctgagcaagaagttatctctacatctctcttcttgtttcattttacatatttcttttaaagaatatatttagccttatagttaatttttcttttataaatcatagtgctggcactgggcaaatacctactaaatgaagaaaacatgtagcagagttactttatatgatagttcttctattaaactttttttttttttttttgagatggagtttctctctgtcaccaggatggagtgcagtggtgcaatctcggctcactgcaacctccgcctcccgggttcaagcgattctcctgcctcagcctcctaagttgctgggactataggcgcgtgccaccatgcctgggtaatttttgtatttttagtggagacggggtttcacaatgctggccaggatggtctccatctcttgatcttgtgatctgcccacctcggcctgcgaaagtgctgagattacaggcctgagccactgtgcccggcttattaaactttttaagctttttgtttaccaaaactttatttatataaaagttcaaaataaacatgcaaattgactaactgtagacagtcctcagttttgtttaatccacacagtgttggtctgagcaatggtctaaatttcttagatgccaatattttaaaactgggaaatttttacttaaaaatctcaagtttcaggtttccctgggaaacagtgaatgtatctggcagtgccagccttgcatcatcacataacaacaatcatctaaagctgagttataaccatactcttagatgagggacatgctccccagttcagcagtccctgtcactcgttgttgtctcctcaacactgagagtctaatgacagttaccactattgtgtggcctatttacctctttcatgttacctttcttgttcctatggttatttcagtttgcaaccccagctttgaaagaatatgtccattcctttaaaatgatggttaggtgaataagctattatctaaaaagctaaggtgtgaagcttgatttcactgaaatgttttcaagtaactcttttattaatttgatattagggaaaattttgagtaacattagagtttaaaacattatcattggttgtatagatgctcctcctcctacttgggaacagctggaaaatgggctggttgctgtgcgtacagtggtacatgggctggttgattatatccagaaccacagcaaaaaaggagcagatcagcagcaggtaaggaagctgtttaaaacttagagttaacccactgtggatatgccttaaaactataggtaaaccactgtgggtatacctacagatacaaagccaaaaagataacatgaacattttgagactctgagtatagaaactgtaaattaccttggcatggttaacagtttactgcattaggctgataactttatctgacaatattgacattaaataatccttattgatctgatgtcatgctggggtcagtcttcacattggatatggcagcatttgatggagaaaatggattcagtgctgaagtttattccatttatataagattattattctctttagtttgtttaacattttggtttgacaataagtatcactttttagtgctaatactgtgtctttccaatactgttcaaatttctatagattttcttattaatattttaagatttttttcattcataatgtcttatgccattgggccaaatctccctcaaagtttttagatgaaaatacgatggtagaatataataacttcttatagctagagttttaaattttattcccagtaattttattttgctctcaggatttatattaggttcattagatcttttattttgcagtagtaagcctgtgaacgtaaaactcttaatttacctggttcaggtaaatataaataggttactcagtattcctttttgcttaagaggcaagaaatataaaaattatcctgctaagtaaaataatctggatatgattttcctaacctatctaacacaggtcaaagctttatttatgaataggcataaaagaaaggagaacctacagtttttaactctctgtttcattagacatcttgaagaaaataacaagagtaatgagactaacctttaaagtctgccatatagtgataaaatacactaaattttgtccagtttagtgttgtgtctcatatttcattaactttcaaatccatcctcctgccttatccttgagttataaataataagtgtcatttgtacttttggaactattttaagttcttcatatattattctgcatgtcaagaagaattagttacagaatattctttgattatagggccttttgtagtttttgtggtatgttgtatggaaacatacatatagctatattgaacattgtacaaaacaaatattagaagataatttatatatttgaaagtcttaaactacagtggtttgttttttcattataaaatgtggaaatgggctgggcacagtggctcacacctgtaatcccaagcactttgggaggctgaggcaggcggatcatttgaggtcaggagtttgagaccagcctggctaacatgatgaaaccctgtctctactaaaaatacaaaaattagccaggtgcggtggtggacacctgtaatcccagctactcaggaggctgaggcaggagaatcgcttgagccggggaggtggaagttgcagtgagccaagattgcgccgctgccctccagcccgggcaacagagtaagactccttctcaaaaaaaaaaaaaaaaaaagtggaaatgagatcatagtgtccccatgagctttttctttttccatataatacaagtataagaatgcccatgagatttattcaagaatttatattatgctacttgtttgagaattaatatcaacatatcagaaaaattaggactaccttctttgtttttgctttatttatatttggactttgaaacttcagacagaatgactttccagcacttttgctcttggtaatctaaataaatatgtgaattacttatctagattatcaagatcctaaaatgacaacacaaaatttatgtttttttgtggggggttattacacatctaatgttttgattttggttttagcctccacagcatagcaaatacaaaacatacatgtgtcgagatatgaagcagagaggaggatgccctcgtggggccagctgtacatttgcacactcacaggaggaactggaaaagtaagtgtgaaagtcaggagactttggaataaggtgtaagtggaataattcgctgacatacagaaatacagaaagagtagctgctttatcttaaatgaataggacatttttagaatgtaacacagcttgaacattcctattctgaaaatctgaaatgcttcaaaatccaaaaatgcttgaaagccaacttgacaccacaagttgaaaattccacacttgaccttgtgatggatagcagtcaaaacttcatgcacaaaattatttaaaataatgtataaaattactttcagactatgtgtaaaagatgtatatgaaatataaatgaatttcatgttatatatttgggtcttatccccaagacatctccttatgtatatgcaaatattccaaaatccaagacaaatccaaatcttgaaacacttctggtctcaagcatttcgggtaagagatattcaacctgtacataatttttaaaaatgaaaagcagtttcttcagcttttattgcatcatgcctatagataggaaactattttatgattagctaaatctaaaagtgggtcattttcactacaaaaaaaattaaaattataataattttaatcaattttaacttaatttaactaattgcatgatgtatttccagtggaaaattttgcccttggctcagtttaacagattcttttaaacttcaaggacaagataatttcagggatgttaaatttttcagctcattgaagaaagaaaggaaaaacctcttaattttttttatttttattttattttattttattttttaaaaatagagacagggtctccctatgttgcccaggctggtctcaaactcctgggcttaagggagcctcctgccttggcctcccaaagtgctaggattacaggcaggagccaccacacccaccgcctcttaatttatttataaatccaatgtaacactttcattaaatttgacaaagataacacaattaaaactgcaaatctactgcaagtattaatattaaaaatctcaaaaatttaaatataattcagtaatacattacaatagatgccatgtctaagggcataacaccctgaatccacctgagctcatctgatctcggaagctaagcatggtcaggcccagttagtacttggatgggagactacctgggaatattgggtgctgtaggtttttttttttaatataaataatataatttttttttaaagaaaagaaaatagatgccatgactctgcaaaagtagtacaatataattatcacaacttagaaaataacatgataatatccaaaaaatgccaaaggcctttgaataaaattgaatgtcaattaaaaatcaaattccagccaggcgccggtggctcccagcactttgggaggctgaagcgggcggatcacaaggtcaagagattgagaccatcctggccaacattgtgaaaccccgtctctactaaaaacacaaaaattagctgggtgtggtggcatgcgcctgtagaccaagctactcgggaggctgaggcaggagaatcgcttgaacccgggaggtggaggttgcagtgagccgagattgcaccgtagcactccagcctgaacgacagtgcgagactctgtctccaaaaaaaaaaaaaaaaaaatcaaaattccttaatacaacagaaatgccatactttctcagcatggtaataaattatattataaatcagaagccaacataatagtatgatgcttaattagtaaaatattcgattcactctcattaaagtcaaggataaagcaaaattttctgctagtaattagtagtaaaattttctaccactgttatttaacattgtggaagtagtagctaatgtatgtaagaaagaataacatagccataaaattattgggaaaaactttagtactagaaacaaaagaaatgagaatttagtaagatggcaaattttaaaaatcacaaacatgaattgccctcgtgtaaactaaaaagagaaacataaccagtttaaaaataagttaaaattaaggatctcttccagggtgtatataaattgaaccaataaattacctaggaacataagagaaatattgagtaaatatactgtgttcttggataaggtttgatgctataaaagtttcattttcccataaacaacaaattccaagaaatccgaatttaaatctcaccatgatgatgttaagatcctatcaaaaattcatttgtaaagaataaataggtacaaatagcaaggaaaattctgaaaattctggaagttttagacaggaactagactaataactatttacctgtattatggactacagtgaataaaagactttagtcttttgcgtaggaatagatagattaatgaaatgcaatagagaatctaggaggagtttgagatgcatataggagcttagcatatgtgctaaaggtggcatttcacatcagtgaccaaatgaatgatggaaaataactgtcacctatttgaaaaatagagctggattcttaccacaatctttatactaaaatgaactctagatgtataagagatttaaatatttaggaaggcaagaaaccacagagtagttaagaggatttttgtttgtttgtttttagttgttaaataaggaaagaaggaaaagatttttttaagaactgcaacccagcatccataaaggaaaagattgataaatttgattacataaaaattataaaactaagatatggtacaaatacagttttttataaaaagcttggtgaggaaatgacacacagagggctgatatcctaacataaaatgagctcttacaagtctgtaggaaggagaggaaccaatagatttatggatcataaacatagtttacggaagaaatactaatggccaattatcctgtgaaactatgttcaatctcactagttgttaaagaaatgcaaattaaagcaacttagtatttttggactaccaaattaacaagaccagtgctacccagtatttgatgaggttttgaaagacgtttttcttcatgatcagtaggacttaaaatagttttagagagcagtatgacataaaaatttctaatttgcgtgctctttgacctcattctgcctttgcttatttggttattcacacagggtgcaagtacatgttcataattatctgttactttttttttgagacagggtcttactctgtctcccaggctggagtgcagtgatgcaatcatggcccactgcagcctcgacttccaggctccaatgatcctctcacctcagcctcccgagaagctgggaccacaggtgcatgccaccatgcccagctaatttttgtatttttggtagagacagttttcccatgtttcccaggctgttcttgaatacctgagctcaagtgaatccacccacctcagcctcccaaagtgctgggattacaggcgtgagccattgtgcccagcacattattttaatagccaaaaaaaacccaaccagcctaaaatgaactgacataaagggatgtctaagattattaagtggagggaaaaattagcagtaatatatgactcaactgctgcaaataataatcttatatgaatataaagctaatgtataaaggaacaattccatataatgatacactagactttcaacaataattacccctgaggggtagttttctccccaacctcagaaatttgtcagttttgggaaacgtggaaaaatagcattattactctgatggggttttatttatttttttatttactttttttttttgttttttgagacagggtctcgctctgtcgcccaggctggagtgcagtggcacaatctcggctcactgcaacctccgcctcccgggctcaagcaattctcctgtctcagcctcctgagtagctgggactacaggtgcctgccaccacacccagctaatttttgtatttttagtagagatggggtttcaccatattggtcaggctggtcttgactcctgacctcaggtgatctgcccgcctcggcctcccaaagtgctgggattacaggtatgagccaccgcgccaagccgaggttttatttttcaaaataaaaatgcattagcagttgtaaatggacttgctttcattgttgaggaacaaagatcctggagtctgatggcttatattttttcctttggttagatttcagaatcgatgtgcttgttgtaccacagcatctctttaaacccaggcaattattctgtattggttccattaacctacttttaaaataactttaattttgtattggcatacataacatcagcatctctgaagcagttctaataaaagtcactatccttaattgcttaaatttttttttgaaacagggtctcactgtgttgcccaggctggagtacagtggtgcaatcttggctcactgcaacctctgcctcaggctcaagtgatcctcccgcctcaacctcccgagtagctgggaccacaggcatgcaccaccacacccggttaagtttttatatttttggtaaagacaaggtttcaccatgttgctcaggctagtctcaaactcctgagctcaagtgattcgcccgcttcagcctcccagagtgctgggattactggtgtgagccacagtgcctggctgcttaaattttttaacagagtaaatgacaaatgtttcacagtgcatactggctttgtttttcttttattcctaattttttaacattggctcattgtatcccaaggcatttgagggagagctgaagtaaaatatttcagaaactatcttctaaagatttttctactagcttctccaataagttttagaaatacaaatgtccacagaaatatattatagcaaaaatattaatagcataatttataatatgacaaatgttactcttttttttgagacagaatctcgctctgtcgccaggctggagttcagtggtgtgatctcggctcactgcaaccgctgtctcccaggctcaagtgattctcctgccttagtctccctagtagttgggaccacaggcacacgccaccacacccagctaatttttgtatttttattagagacggagcttcaccatgttggccagactggtctcgatcttaacctcgtgatccgcctgcctcggcctcccaaagtgctgggattacaggcatgagccacagcacccggcctatgttacacatttttatgaggaattttatacttaatatgtcttgctgctagagattttatgcaaaatatacacactgatagagttaatgtttcaagagagaatatttctagaaaataatattaagtacattttagttcttggttttgcttttatatttgctttttgatatgtgcctatgctttttatatagatttcgtaaaatgaataagcgcctggttccgagaagacccttgagtgcctctttgggtcaacttaatgaggtgggcctgccttcagcagctatccttccagatgaaggtgcagtggatctccctagcagaaaacctcctgctctgccaaatggaattgtatcaacagggaatacagtaacacagcttattccgcgagggacagaccccagctatgattctagtctgaaaccaggaaaaatagatcatctgagcagtagtgctcctggatcccctcctgacctgtacgtcatttttctaactcttatttcaaaatttcttcttcataaagtcgaaggaagatagaataattaatgtttgggatttaaaaaaaaaaaaccctgattattttttttggcctttattttgttgcttttttatttcccatgctagtgttttttaagaaacaattagcatagccaggcatggtggcacatgcctataatcccagcactttgggaggctgaggtggacgggtcacttgaggccagaagttcgagaccagcctggccaacatgatgaaacccatttctactaaaaatacaaaaattagccaggcatggtggcacatgcctgtaatcccagctacttgggaggctgaagcatgagaatcgcttgaacccaggaggcggaggttgcagtaagccgagattgcaccactgcactccagcctgggtgacagagcgacagagcaacagagcgagactctgtctcaaaaaaaaaagaaaagaaacaattaacataggggaaataagatttaaaaattgcaaattttgtagaagggaggactattagaataagtgagtttcccaaattgtagcaatcttttttacttgtaacaatttatgcacatgagaagtattttttaaacaacttccataatattattcccttaggctagaatctgttcctaagagtatttctgccttacctgtgaatccacattctatacctccaagggggccagcagatctgcctccaatgcctgttaccaaaccacttcagatggtacctcgaggttctcagttatatccagcacaacagacggatgtttattatcaggatcctcgaggagcagctccgccatttgaaccagcaccttatcagcagggtaacgattttaaatttatattgctaacttttcttaggaattatcagaactgttcttcaggtcagagtgatcatttacacagtagcctctttaagataagtaaatgtataaatgcattttttaatactttggaaaaattgagattttatgattaactaaatactatgaaataaatgaaacaaagtaataaaaatcaaaccgccatatctactaaaagcagttgcataatacatgtgttcatatataatatttatggaaataacaagttacacaagtaggcaatggaaatttgctgagtaaggcagcatatattctcctgaccaaaattttcttcaagcatgaaaaaagaattaatattatagtgtgtgtaaattaaacacccacagtacatttttcttcttttaattattatttttctgggccctgtaatatatatgaaaaaatgcagcatacacacctttagagagtttacagaatagaataaataatggtaaagaatagaaaactatatgcatgagtagtagatgcatgtgtgtggtgtttatgtatgtgttaaaaattaagtgatctgttgtggttaatattagcttgatagagattgactgaaagactcaagggagatcattgagaacttgaggaatcaaaaagacttaatggaagaaatgccctagaggtatttggaatagaaaaaaaaaagttatgaatggattggaaaaatgagagttgagttaggaggctgttaatcctggtgtgagtactgacgaattagtgtggtgggaaaggagaagaagggatttcaaaaatagacaaatttgaaaattagccagctttaatgataataccaggtatggagaatgaaggaaagaaaataaactaacgttttacatatatagtttatatgtaaaataaacactgaatgattttaagtgttggatctctctgtcagaagcagtatagtactataatttttaaaatgggaatagattaaaagtgctgtcttctttttccgagtctgtcatttaattttgaatcatgttgtcttctctacattcattcatgagaatgttttttaattgatatggcattactaattcatgcaaaatatgataaaacgtgatttgtatcttcctttgaccatccattataggaaaaaatgcaactctttttgtagcctgttttcaattttaggtaaattattttagctatattaagcagaaagagatttagtgcaggagttaggtgcctgccatattggtggaggtactaaagaagcaaacagtgctccagagttagctgccaagagaacttgttacaatgaagaagcagtagaagtagaaacttctgtcctaactgcttaattccaagatcacgtcatttgaggcaaaagttggaaaactgagaaactattgccacaactgttgtctcaagaactgtagagccaagcagtagctactaatctgcgccagcaaaattggccttttgtgttccatgtctcctcccagttatttcagtttcaaattcaaaactcatgcaagtgattgatttgtggaacctgacttcaaggatatctgggaaatgtagtttttttgttttccagtgtcttcattgcattaagacacaccagaaagagggtcaaacaatgagagccaatctactattatagattataagtagggtagttttttcaatgacttttacagataatttttgcttattttttaaaaagctaacctgattatataagcagatggaaaactcgtaaagaaataagtagattatcaatactttagtgtttcagtattttaaaaggtaaaatcttacatagaaaactaaattggctcattatttgcttttgggtcctcttttgtattgtgcaggtatgtattatactccaccaccacaatgtgtgtcccgctttgtccgacctccaccatctgctcctgaacctgctcctccctacttggatcattatccaccctacctccaagaacgtgttgtaaactctcagtatggcacacagccacagcagtacccacctatatacccatctcactatgatggccgtcgagtgtaccctgctccgtcttacacaagagaagagatattccgagaaagccctatacccattgagattccacctgcagcagtaccatcgtatgtaccagaatccagagaaagataccaacagatcgagagttactatccagtggctcctcatccaactcagatcagaccttcgtacctcagagtatgctgtatttttttttattacatagacttaatttgactgttgcttgctgtgattccttactttttatgcaatgacaataaccctttgatgaattcttttttataagagagcttcttttttttttaaatcttttcataatttgggtattttttttttttaaactatataatgagaaaaaaatctgcctcctccccacaattaacctttcttagtttctgaactttagatggtttaattaacaattctagatctacttggtaattatgaccaaataaaagaaacctaaatttagctatttggaagatcttgagagtttggggggttttgttttactttgttctgttaagtgttggtgtttccaaatgttaagaagggtatacaagctgtttcataacttaaaatatacgctgagtatattaaatgaattaatctgtcctgaaattctctttcaattttaactaatctttctatttttaggaacctccttatagccggcttcctcctcctccccagcctcatcctagtctagatgaactacatcgccgacgaaaggaaataatggcccagctagaggaaagaaaggttatctctccacctccttttgcaccttcaccaaccttgcctcctacctttcatccggaagaagtaagcaaatcatttttagtctcatttatccgtgtttttttgtgtgtgtccggtttaagtcatctttgcctattcccaatggtgtgaagattttttttcctgttttcctctgaaaggttttttatcatttaactctacaatccatctagaactgatttttgtatgtatgtaatgtaatgcattaggagtcaagatctttttttttgttcctgtaaggcactgactcggcacaatttaatgaaatcagcatgctttccctggtgtcctgctttatcataatcaggtgaccacacatgtgtttcctgaccctattcttttccgtcagtctatttctatccttgaaccgatgccacattctcttcgtatagttttataataagtctcaatatgtggtggttatattttctagtattgttatttttcaagaatcagcacgttgatttccacaaaaatatctgcttcaattttgattaggattacatcagatctgtaaatctgtgctgtccagtatggtagccactagccacatgtggctgttgaacatgtaatatgtggccagtttaagttcagatgtactatagtcatcaaatacacactgaattcaaggatttcataccaaaaatgtaaaattcattaatatttttgatacattggattaaataaaattattaaaattaatttcacctgtttttgttgttaatgtggccaccaaaatgttttaattttatatgtggatcacatatttctattagacagtgttgctttatttttatttatttatttttttgagacagagtctcactctgtcacccaggctggagtgcaatggcgcatttttggttcactgcagcctctgcttcccaggttcaagcaattctcatgcctcagcctcccaagtagctgggactgcaggtgcacaccaccattcctagctaatttttgtatctttttttttttttttttttttttgagtcggagtctcattctgttgcccaggccagagtacagtggtgcaatctcaactcactgcaacctccacctcctgggttcaaatgattctcctgccccagcctcctgagtaactgagattacaggcacgcaccaccacgcccgactataatttttgtatttttagtagagacacggtttcaccatgttggccaggctggtctcaaactgctaacctcaggtgatcctcccacctcagcttcccaaagtgttgggattacaggcatgagacaccacgccgggcctagacagtgttgtcttagatcaatatgatgagaagtgacagctttcttttttctgagacagagtgttgctctttcgccaggctggagtgcagtggtgcgatctcagctcactgcaaccaccgcctcctgggttcaagtgattctcctatctcagcctcccaagtagctgggactacaggcatgagccaccatgcccggctaattttttgtattttagtagagacggggtttcaccatgttggccaagatggtcttgatctcttgacctcaggtgatctgcccgtcttggcctcccaaagtgctgggattacaggcatgagccaccgcgcctggctgagaagtgacatctttctaatatcaagtctctatgaacatgatataccccttcatttatttggattttctttatacttcatacttcagtgtcttgcgcgtcttacattgaattttattcctcgataaccaatgttttttgaaactattttaaatagaattgtttggaaatttttattttctattattaatatagagaaattaaatagatttttatgtattgacccttctattcagcaggcttgctaaatttctttattaatcataataatgttagtagattcttttgaattttctgtgcacacaattatgtcctctgaataatctttttcccctttttaatccttttgttttgtctttgtcttattattttggactccagcataatactgaatagaagtgatgataacacatattcttgactcctttctaatctttgagtaaatggagcttttaataataatttaccattatcatgtttgctgtaggcttcttggtagaaaatctttatcatatttatgaaggttttctctaatcctagtttcagatttattttaaataagaaagaatatcaaagatttatttaactcagtaatgaggaaaccagccagaaaagttggtttaatgaataggaaaaaacaggtaaatatagatagtgaaaatcagaaaaaaaaaacagtcaaataagattgctcaaaaaaaaaactggttaatgtatcacagggcaataaccataatttggggagtcaacttctttgtatttctgtatgacaatgctagtagttatagtgaataagtgttgtcttattatcttaatgtctagatggtctacagtgatgttcgtttttctatttctatattggtaatttttttttgtcagtcctgctagggatttatcaattttatttgtctttcaaaaagccaacttttttttttttgttttgtgagacagagtcttgctctgtcgcccaggctggagtgcagtggtgcgatctcggctcactgcaacctctgccttctgggttcaagcgattctcctgcctcagcctcccccagtaactggtattataggcatgtgccaccacacccagctaatttttttgtatttttagtaaagatggggtttcaccatgttggccaggctggtctcaaactcctgacctcaaatgatctgcccgtcttggccttccaaagtgctgggattacaggcgtgagctactgtgccctgcccaaaaaatccaactttaaagtaatcgtatttgttttgttgattgtacatactgctttagcttatagtttgtatttttttttttaataatcaagtaaggtttctcaggattacagttgatactatgtaaggaacttgtcttgcatcctttatgtatagaattatgattctaaacattgctaactgacaaatcatgaataataaatgaaaattgagaagtacatcacacatagtaaatagtatcttgttgggtatatgaaggaagtctactaaatagaagttgttcacaatatctagttttctcatctaaacactttggatgagttttccacaaaaatgtaggttattagtaaagtcacaacatcttctattaatgtagttttatttgtaaagtaaaaacagccaggtgtgcattagctcacacctgtaatcccacactttgggaggctgaggtgggaagattgcttgagcccaggagttcaagaccagtctgagcaacatagtgagaccccatccctacagatttaaaaataaaaatgagctaggtgtggtgggacacgcctacagtcccagctacttgggaggctgaggtgggaagatcgagaggatcgcttgaacctgggaggtccgtgctatagtgagctatgattgtgctactgcactccagcctgggtaacaaagaccctgtctcagaaaaattagagggggggaagaaaacaggtgtgatattttttcaaaaattctttattagagtacaccctggaactttgttatgccatattgttttataagaaatatggaaaacaatatgacattgtaaaaactgagcagtttttggtatcaaacattctaaactttgaggttcagttgtgtccttcactgtgtgatctttttaaaattacttagcctccctgaatcctgaggtgcacgtttcttcatttataaatcaaacataataaagcctacctcatagtggtgtggtgaagatgaaacataaggcatctggtatgtagcaggcattcagtaaataattcatatttattattgttatttttactcctaataaaaattataataatgtctgagtattaaggaacattatctagaatcattttagttactgagatgcaaagacatatatttaaacctcagttctgattataaacaacctgaatacaaaaattagccgggcatgatggtgggcgcctgtaatcccagctactcgggagactgaggcaggagaattgcttgaacccagcaggcggaggttgcagtgagccgagatcgcaccactgcactccagcctggatgacagaacaagactcgttctcaacaaaaatttaaaaataaataaataaaacaacctgtgtatagttgtactaaattcatacattatagaaatacatgatatagaaagagaagtttctcgaaaatctcattttctataaccatttattatgtatttaaacttcttatatatatttcaccttctttctgtgcatgaactaacatctttttagtagacacattataattgtacaagtttatgggatacagagtgatatttctttctttctttttttttttttttttttaattttttgaggtggagtttcactcttgttgcccgggctggagtgcaatggcgcgatctcggctcaccgcaaactccgcctcctgggttcaagtgattcttctgcctcagccacccgaggagctgggattataggcatgcaccaccacgcccagctaattttgtatttttagtagagatggggtttctccatgttgatcaggctggtctcaaactcccgacctcaggtgatccgcctgccttggcctcccaaagtgatatttcaatacatatatacaatatgcaatgatgaaagcagggtaattagcatatcatctcaaacatttatcttttatttattttgggaacattcaaaatcctctcttccttggacaattgtgtatgtgatactcactgctggaaggtcaaggttacagaaatgcaggatgcttccagagagtttcaggtcaccctttgactggtaggtaggtagcatttaagtcattcagaacagtcatccaaattttcttttcttttttttttctttttttttttttttgagacagactcttgctctgttgcccaggctagagtgcagtggcacgatctcggctcactgcaacctccacctcccaggttcaagtgattctcctgcttcagcctcctgagtagctgggattacaggcatgcaccaccatgccaggctaatttttgtatttttagtagaggcagggtttcaccatgttggccaggctggtcttgatctcctaacctcagatgatctagccacctcggcctcccaaagtgttgcgattataggcatgagccactgcgcctggccagtcatccaacttttctttgaagaagagagcagtgttacatttaattgtaaatttttgtattatgtaacattgtaggaataacattcttcctgtgggctaaataaatatctccttatgattttcagattttatttcaaggaaaaatgctgggtagatctactgttgtccttgctttttgtatctacaacattgttgacatagtgtttatctcaagattcctttataaattggccgggcgcggtggctcacacctgtaatcccagcactttgggaggctacagtgggcagatcatgaggtcaggagatcaagaccatcctggctaacagtgaaaccctgtctctacgaaaaatacgaaaacaaaactagccgggcgtggtggtgggcatctgcggtcccagctcctcgggaggctgaggtgagagaatgacgtgaacctgggaggcagagcttgcagtgagccgagatcgcgccactgcactccaacctaggtgacagagcaagactccttctcaaaaaaaaaaaaaaaagccaacatctcttactgcaaacgtgatgttgttgttgttgttgttgttgttgttgtatgaagattgtggtttctctttttttttttttttttttgtgacagagtttcacactgtcgtctgggctggagtgcaatggcgtgatctcggctcactgcaacctccgcctcccaggttcaagcgattctcccgcctcagcctcccgagtagctgggattacaggcgcccgccaccacgcttggctaattttttgtatttttagtaggaacagggtttcaccgtgttagccaggatggtctcgatctcctgacctcgtgatctgcccgcctcagcctcccaaagtgctgggattataggtgtgagccaccacacccagcctaagattgtggtttctttcttcctcaaatcgaaaatcattttgttgatattcctttcttttgtcaatctatcctagatactttccattttattttgactttcaagatcctaagtagaaaattttaaatgtttctgttttcttaaaaaagagacagggtcttgctgtgttgcccaggctggtggtctcaaactcgtgggctcaagcaatccacccaccatgccccgtccaaattttttatgtcatttgtaaataagtaaataaacctggatggaattggtctatagaaataatggataaaattgtatataaagatcagtttatgatgttaaaagttttcttcaaaaaaacataattttttcaaatcaggaaaaacaatcctctcttctagtttttagaaaatatatagtaaattattaactgtactcaccctgcagtgctatagaatgctagaagtaattcctcctgtgtagctataattttgtatctgttaaccaagctctctccccttccctccccccattccctttctagtctctcataaccacagttccactctctacttctgtgactcaactttttagctcccacattgagtgagaacatgaaatatttgtctttctgtgcctgaccaatttcacttaatgtgatgtcctctaggctcatctatgttgctgcaaatgacaggatttatttttttatgtctgaatagtatttcattgtatatataccacattttctttatcaattcatctgttgctggatacctaggttgattccatatcttggctattgggaataaaacatgagagtgcagatatcccttcatatactgatttcttttcctttgaatgaatgcccagtagtgggattgttggatctctgtattattattattattattatttgagatggagtctcactctgttgcccaggctggagtgcagtggcatgaacttggctccctgcaacctccgcctcccaggttcaagcaattttcctgcctcaacctctcgagtagctgggactacagtcatgcaccaacacgcccagctaatttttgtatttttagtagagatagggtttcaccaccttggccaggctggtcttgaactcccgacctcaggtggtctgcccgcctcgacctcccaaagtgctgggattgcaggcgtgagccaccttgcccagcctcattattattttttaataggatcatttagtaaatacatcttggttttatgtctgtcttgcctttgtttttgtttttacctaatccattctcctggccgtctttgtatgtcagtatataaatttatctcattcatttaaatagctacatataatacactacagagatttaaaaaaggagcactcttggccaggcatggtagctcacgccagtaatcccagcactttgggaggctgaggtgggtggatcacctgaggtcaggtgttccagaccagcctggccaacatggtgaaaccccttctctactaaaaatacaaaattagctgggtgtagaggtatgcacctgtaatcccagatacctgggaggctgagtcaggagaatggcttgaacctgggaggcagaggttgcgtgagcagagatcatgccactgcacttcagcctgggtgacagagcgagacaccatctcaaaaaaaaggagcactgtaattggtaggtcatgtggtttaaaagttggctgttctatctaaagttagtaagtagaagaaaaataaaaaaggataaaaattttttaaatagtagtaggacaaagaaaagggaagaggttatgaataatagagacagaagagtgattgacaatgagtgatattagtgagcagcagaccctatgtcaatgcagaaggccaataatgatgactcagaaaagagatgtttttagtatagcgggaggcatagatccacttaaatgaaccaatacaaatgaacactgatacccctagatatcagtgtatgtatgtcttgtgataaaatgaaagaaacattaaagttatagtcctagcactgccctatactggtatagccttggtcatatcatctgtgttgtctatcatggatttaggagcttattaggtagtatacatgaaaacactttgaaaatgtaaaacattttataaatgtgaatgttgcaattttagtgaaaatacattagccttagaatagctattctgttattagactggagaacttaccttgagaagataaaaattagacatccttttcatctcattgaatcaacctaaggaacagaatttattcaagatatgaattattgctattaaagagatttcagtaaaaagttactacatcatcatgtactataaaaatcaaaatttttaatgttcttgtttaccttgattttattgaaagaaacgttgaggagggtctagcaaaactatggcttggtacatatatgcttaaatgtttactgatctaatgaagaaaaggatgagcaaacccataaaatcctagtttgattcctggaaggatattgaaataccttttttttttttttttttttaccttctgctaaggtaaaaaaaaaaaacaaaaaaaaaaaacctgaaagctaaaaatcactcttcacttattttatatttttcatagtagtttacaaaaatcttctattgtggcacttaaaaatcaaataatcatcattatgttgcttcagcacgatgttctaagaaattccctgctttctctgtcttgttactcatagacccatttcctgttttgtttctttctcttttttttttttttgttttttttctttctccatctgtagtttttggatgaagacttgaaggtagctgggaaatacaaaggaaatgattatagccaatactctccctggtcatgtgacaccatcggctcctacattggaaccaaagatgcaaaacccaaagatgttgtggcagcagggagtgtggaaatgatggtatgtgtaatagctaagcaataattaatacaaattaagataaaccaaataaatttttacccattaccatttaggcacaaataattcagctttgcttaagagtttcagaccatattctatactctgcagttgagttatctttaaacagtataggtttttgattcatttaggtgtaaataaaaatattttaatacttaccgagacagagcatttattatatttctgtgcaaatagcaatttctcaacaattgtttataacccagattaaattattttacataattaattaagatcttggacttcttcaccaaataagttaaaattctttgtcacggagaatggcatgaacccgggaggccagagcgtgcagtgagccaagatcgtgccactgcactccagcctgggtgacaaagcgagactccgtctcaaaaaaaaaaaatttttttttcacagctctgaagtttaaataacaaagttgaatctagtgaacaaaagtagtatttgagtcagaattatagctgctcagcttcaagtgaatgctgagatactgaaatttaatacttgggttattttattctttagtgaaaaatcatgtaacaccagtgtttctaataaccaagttgaaaatattatcaaaatcttatctctttttttgggggggggatggagtttcactcttgttgcccaggctggagttcaatggcgcgatctcggctcaccacaacctccacttcccaggttcaagtgatactcctgcctcagcctcccgagtagctgggattagaggcatgcgccaccacggccagctaattttatattttttagtagagatggggtttctccatgttggtcaggctggtcttgaactcccgacctcaagtgatccacccgcctcggccttccaaagtgctgggattacaggcgtgagccaccgtgcctggcttcatcttatctctttttatagagataggatcgatctttgtcacccagggtgtagtgcagtaacatgattatggttcactgtaacctcaaactcctgaactcaggtgatcctcctgagtacctaagactacaggtgcttgctaccacacccagctaatttttttaaaaaaatgttgtagagatggggtcttgctatgtttccagactgatcttaaactcctggcctcaagtgatcctcccgcctctccctcccaaaatgctgggattacaggcatgagctaccctacctggatagtatcttaattccctttttattttttaaagaaataaaattttcaagaagtagttatatccccctgtataaatcccccaagtctcatttttctccctgtttcattccctctaagtaatctctatcctgagtttagtatttatcattttcatggataattttatttcccctaagacaggatctccctcatgctggagtacagtgtcacaatcacagctcactgcagcctcacactcctggactcaagtgatcctcccacctcaccctcccaagtagctgggacacagatgtgtgatactatgctcagctctttttttttttttttttttttggtagagatgaggtcttgctatgttgcctgggtaggacaggctggtcctgaactcctgggctcaagcgattctcctgcttctgaaagtgctgtagttacagatgtgtgccagtatgcctggccatggataattttatactattcctaaacaatattgttttatatgtttatagaccttatgtaaattgtacacttcagcttgcattttcatgttttcacttagcattgcttttaagatgtgtactttttttttgagacggagttccactctgtacccaggctggagtgcagtggcatgatctcagctcactacaacctctgcattctgggttcaagtgattctcctgcctcagcctcccgaggagctgggactacaggcacataccaccatgcccggctaatttttttgtatttttagtagagatggagtttcaccatattggtcaggctcgtctcgaactcctgacttcaggtgctctgccctcctcggcctcccaaagtgctgggattacaggtgtgagccaccacgcccagtctgtatttatatctgtagctcaggattattgattttagctgcttttacgagatattctgtgtaactgataccatacaatgattattttttgtattggtggacatttaggctatttctgatctttcactgttaggtatggtactccaacaaacattcttcaaacattcttatgtatgtcttcacgtgtgtgaaagttacacttagaaatggtattgctggctgggtactgtggctcatacctataatcccagcactttcagaggccaaggcaggcggatcacttgaggtcaggagtttgagaccagcctgggcaacatggcgaaacctcatctctactaaatacacaaaaattagctgggcatggtagcaggagcctgtaatcccaggtacttgggaggttgaggcaggagaattgcttgaacctgggaggcagaggttgcagtgaaccgagattgcgccactgcactccagcctagacaacagagtgagactccatctcagaaaaaaaaaaaaagaaatggtattgctgaaaggtatgccttcactattattcttaacccatttgtccttattaactctaacagaggtttcctaggttattatatagattttcatagataaatacttttccaggtggttaagaaaagaccaatatttgcaataaaaaaagatttggatgctgataaccactgtaaatgagtgaagtgatatctaatagcataaatacaattatatgccagccccacccccccccccaaaaaaatagagagttttagaggaagaaaaagcaaaataaaatttttttttttgcagtagaattacagaagcattgtttttaggctgtagtaaggctcttattggaacgaaatgaggggaaattaggcaggaatctttgccttgtacttggctttcaaaaggaaagggttattatattaaagtaacacgagtattagcaaaataaaactcattttcttaaatcagtaaagaattaaaaagtttgggccaggcatggtgactcaaacctgtaaccccagcactttgggaggccaaggtgggaggattgtttgagcccaggagttcaagaccagcctgggcaacatagcaagaccccatctcttcaaaaatttttttaattagccaggtgtggtggtgcacgccggtcccagctacttgagaagctgaggcaggaggatcgcttgagcccaggaggttgaggctcacacatcactgcagtccaacctggtgacagcagaaccctgtctcaaaaacaaacaaacaaaaagttgcaatccaatctagaggtaattgaaaacctcccaaataggtgaaagaagtctaacctagtatttctcaaatgttaatgtgcatacaaactatatatttgtgtgtctatatatatgtgtaacattatatagggataaatatatatttgtatgcatatatatatactaggtcattatatatatatatatatttcttcaagattgaattggcttttattagtgattgattaatcaggaagcatttcatctgtgaaatagaaagatgctctaatgagctaaacagagaaaaggaacaaaactcagattagttgtttcaaagttattttccttataggactaaagcagaagggacttaccagttcaaattgagtggtcctcttatgattgattgctgtgaatctcctgttttttggaaaactggcccattttcaagttcagtttgattttgtggcatctagcataagtgattacattctgctttgatctggtgtcttggggcttagtgcgggagcttagtccaaaacagtggcctcccataaattttaaaaatatatttcttaggccaggtgcagtggcttatacctgtaatcccagcactttgggaggctgagcttgaggcaagctaagcccaggagtttgagaccagcctggtcaacatagggagacctcatctctataaataatcaaaaaaaattagctgggtgtgctggtacatgcctgtagtcccagctacctaggaggctgaggtgggaggatcactggagcccaggaggttgaggatgcagtgagccatgagagtgcccctacgttccagcctgggccacggtgtgagaccctgtcgcccctcacctcagaggtttaaaaaccagtgttacataaaaacaaccaaaggtaactaatgattttagtcttaccagtaagagtgctgtactcttctttaaccttattacagatctagaaaaaattaggttacagagcgatctgagtgtggggtaatttctcattttgcttttttatcagaatgtggagagtaaaggaatgagggaccagcgattagatcttcagagaagagcagcagaaaccagtgatgatgacctcatcccatttggagaccgaccaacagtgtctcggtttggtgccatctcacgaacttccaaaactatatatcagggtgctggtccaatgcaggctatggcacctcagggagctcctacaaaatctattaacatttcaggtaagaatctcagaggtaagctgacctaaagggttcataatcttgactttcagcattacccctgctctccatttactatcagtgtttttagtaatcttgcaaggcagtaattttcaaactttccatggaatcatccctgtaagaaaggtaatataacccagagaattttaggtatataaactgaaattaaatgtctatatgtgaagctttcctaatgtttcttccccactccacccccaccccaaatagcttaattgttatttgggggaataacattctcattatacagtaatttggaagaaaaactacaaagactgaaagttcattggggaagaaacaaacatatatcagcacccagcatcatgctgcctgatatttagaaaaacaaagttaaagaattttaaaaatctggacatttagggtagataccagatacctgtgtatgcaatacgctgatgtctttcagattatgaataccttaaaagaagaatcaaatctgtgaattataccataataaatcattctcttacagattatagtccatatggaacccacggtggctggggagcttctccatattcacctcatcaaaacataccttctcagggacacttcagtgagaggtatgagtcattctttttacttgaacaaacatgtagaaacctttaaaattaggcaacttctttttgtttttctggtcagtaatatgttaacaaaatgaaatgttaaaatttgattcacactttctttctaaccaaagggagagaatatctatgtcagaagtggccagtcatggaaaaccccttccatctgctgagagagaacagctacgactagaattgcagcaattgaaccatcagattagccagcagacccagctacgtggactagaggtaccagcctagagagccattttattccaatttttgaagggttctcagagattttaaataggaacttttgaggcactgtgaacaaaaaactttaaggtctatttcttaggagttagtataggtttctattcttcaaagaattcaatactggatttagctctgggacaacagaaaacgtaaaatttctgctacctaaaaatagaaaacagattacgtaaaatttcccaacaggagcttatattccctgatggcacatttaaggttttttttgtttgtttgtttgtttgtttgttttggttttctttttttgagacagtattgctctgttgcccaggctggagtgaggtggcgtgatctcaactcactgcaacctccacctcctgggttcatgcaattctcctgcctcagcctcctgagtggttggggttatagatgtacaccaccatactcagcgaattttttgtatttttagtagagatagggtttcacccctgtaatcccagcactttgggaggccgaggcaagtggatcacaagatcaggagtttgagaacagtctggccaacatagtgaaaccccgtgtctactaaaaatacaaaaaattagccgggcatggtggtgtgcacctgtaatcccagctaatcaggaggctgaggcaggagaatcgtgtgaacccaggaagcagaggttgcagtgagccaagattgcgccattgcactccagcccaggctacagtgtgagactccgtctcaaaaaaaaaaacagaactttgacttaaaaagtaaaacatagttccggtgtaataagaataataacacttttcatttacgtagttctgtaccatttaaaaatcactaccacttatcttatttgacccttagaatatccctgatattttaggcaggtggtattgtcctccttttttgattgaagtatatgagtttctcagaagttgaaacacgaacccaagtcttcatactccagattcagtgttctttccatcatgctgcctgacacttagaaaaacaaaactaaagaatttttaaaatctggctggacgtggtggttcatgcttgtaatcccagcactttgggaggccagagcagatggattgcttgagctcaggagtttgagaccagcctgggcaacatggcaaaatcccttcactacaaaaagtgcaaaaattggccaggcatggtagtgcacgcctgtagtctcagctactcaggaggctgaaggcaggaggatcacctgagcccagggaggttgaggctgcagtgagccctgatggtgccactgcactccagcctgagtgacagagtgagactctgtctcaaaaaaaaaaaaaaaaggaatttttaaaatcttttaagtgccacataaggaagactaggttttgtttatacatcatcctttacgttggaacatattctttgaatatggaaaactgaagacattctaatgataaatatattgtcctttctggaggaaaaaatggtactgttagaacattagtctgtctttctaccataatctttaataataagtaagccatcactttaggggggaaaaaaagttataagacagactttcttagtagactttctttttaggaagaccagtaggagattgtttttggaacatatagctggcttgtgcccctatgtacgcaattagatttaggaattttaaaaatctatgtaatacttagattttgtctgctttcgccattgcttatttacattgattcagaacgtcttgccgattcctgtcatagaaacagaatgccatgtttgcttatggcaatctttcgttcattaactttttaaagattcagaccttcaacccaataaggcattactccatatcttcaaatgcatggttttttgtttgtttgtttgtttgttttatatactttaagttctagggtacatgtgcacaacgtgcaggtttgttacatgtggtatacatgtgccatgttggtgtgctgcacccattaactcgtcatttacattaggtatatctcctaatgctatccctccgctttccccccaccacatgcatgattttttgttttaaagtttccaggagcattttctgtccaaaaagactatcagtattatttagaaacttgccacatatttaactcagtacagttaaaagtccttgccattactgaggtttcattgaaataagttataggatttacttcagagaaaattaccattaaaaacagagggggaaagatgcacatctgtagttgacttgtttttcttccatttccttttttttttttttttttgagagacaaagtctcactctgttgcccaggctggagtgcatggagtgcagtggcatgatcatagcagctcgctgtaatcttaaactcctgggctcaagtgatcctccctagtagctaggactacgggcccacaccaccatcccaggctaattttttggtttttttattttttattttttgtagaggcgaggtcttgatatattgcccaggtggatctcaaattcctggcctcaagtgatcctcccacctcagcttcccaaagtgctagaattaaaggcacaagccaccatgcgtagccaacttctctttcaaatcagaaaatacaaggagcaatttatacataagatgaaattactgtttactaaatttaaatgtccctattttgttatttttttgtttgaatggtactcaaagagaacagcaccttacagttgcattattttgttgcaaatggctgggtgataagctactcaaggctgtggtctggaattgagcctggttattctgtgcatggtgtgaagtgtgttgagttttctgtgtgcttggctttatgcactaggctgttagtaacaggctggtgttgcagagggaggcaaacaccctggcaggccagtcacagcccccaccaccgccacctccaaaatggcctgggatgatctcaagtgagcagttgagcttggaactgcaccaggtggaaagggaaatcgggaagagaacacgggaactgagtatggtgagtgttatggtggggaaagagagggaaggtgaaatgaaatctttcatgtggctctagaattatctagaggcacagaatcatcacttcaaggcactctgatgagtggttaatatttaaaataattctcatgcaggtgggctaccttccgattttatcattcccttcctcattctcttggtttgggtgtgttctttgtcttataattcttcgttaacttttagggaaaacaaggttttaatgcttctgtaatttaagaacttaatggaagtcttaaatttctgtttagcatactgattagggaagcaaataggatggtgtttactattttgcaatgacaacatgttatataaagatgtattcaccaaataacattctagtttcatagcctttataatgatgacctatttttgctatgagtgatatgcaatctgcacattgtttcctgtatccattatgtatgcttaggaaaaactatatccattaatatgcttaggatttgcttcatagtgcacagacattcattttagtaaattttgaatcttaggggcttcctcaggttgcatgatatgattttttttgttgcttagttttcataatctttctttttttttttgaggcggagtctctgtcgcccaggctggagtgcagtggtgcgatctcggctcattgcaagctctgcctcccgggttcacgccattctcctacctcagcctcccaagtagctgggactaggcgcctgccacctcgcctggctaattttttgtatttttagtagagacggggtttcaccgtgttagccaggatggtctcgatctcctgacctcgtgatccgcccgcctcagcctcccaaagtgctgggattacaggtgtgagccaccacgcccagccagttttcataatctttctaagcaaataaattgagcatgcaggttttttttgctttcagtaagtatgttaaagatatttattgtactttggttttcttttcttttttttttttttttttttttgagactgagtctctgtcacccagggtggagggcagtggcccaacctcagctcactgcaacctccgcctcccatgttccagtgattctcctgcctcagtctcccgagtagctgggattacaggtgcctgccaccacaccagggtagtttttgttttgtattttattttttttttagttttttttttttgaggcggagtctcgcactattgcccaggctggtgtgcagtggcacgatctcagctcgctgcaacctctgcctcctgggttcaagtgattcttctgcctcagcctcccaagtagccaggattacaggcacctgccaccacacccagccaattttttttatatttttagtagagacggggtttcgccttgttggccaggctgatctcaaactcctgacctcgggtgatacgcccacctcagcctcccaaagtgctgggattactggtgtgagccaccatgcctagccttttttttttttttttcctttttttgagagggagtctcactctgtcacccaggtggggagtgcagtggtgcaatctcagctcactgcaacctccgtcttctgggttcaagtgattctccccctcagcctcttgagtagctgggattacaggcgtgtgccaccacgcccagctgatttttgtatttttagtagagacggggtttcgccatgttggccaggctggtctcaaactgacctcagcagtccacctgcctcagccccctaaactgctggtattacaggcgtgagccgccatgcctggccgcctttctaggtcattgtttttttctgagaaattttttttcatgttagcttgaggcattgtctgtcttattgtccagcttggttagtgagcaagtggattgtattctgttatgtttttatgtatgtcactcttttagtctgccagtttctttggttattttacaaaattgaatatgatttctggatcatcactttgtattatctgtaatttggtctctcccattaacaccattaaatagatgataactgattttatttccttctctttcaaaggaaaaccagtgttctctggacatgaaaagcaaactgaatacaagtaaacaagcagaaaatggacaaccagaaccacaaaacaaggttccggctgaggaccttacattgacattcaggtaaagaaaaggagattgtcgtagccatattaaattacacacaaaagagaaactaatatattatccagtcatatcagaaataccctcataaatataatttgattcttaaaatatcattattctgtgtacataaagaatatttttgcggccgggcgcagtggctcacgcctgtaatccagcattttgggaagccgaggtgggcagatcacgaggtcaagagatggagaccatcctggccagcatggtgaaaccccgtctctactaaaaatacaaagattagtttggtgtggtggcatgtgcctgtagtcccagctactcgggaggctgaggcaggaggatcacttgaacctgggaggaggaggttgcagtgagccaagatcgtgccactgtactccagcctggcagcagagtgagacacggtctcaaaaaaaaaaaaagaatatttttgcataaatctggagttacaaaacttagatccaaggttgaattatctgttaatacctaacaaaggaaaatttctggttatgtttccatcttccccttgtttttaaatttatttcgaatacagccttatatctttacattataaaaatactatatgctcaatgtaaaaaaaaagaaaaaacaaaaaataaagtcactcccccatcttaaatatattataaaaaattagctttaggaaatggaaaattttagaaaagggcaaattttaaaattgcctgtaattccaatattcagagataactcttgttaacattttggtgtattatattatctttccagttttttttttgagacggagcttcactcttgttgcccaggctggagtgcaatggcacgatctcggctcacggcaacctccgcctcctgggttcaagcgattctcctgccttagcctctcgagtagctgggattataggcatgcaccaccatgcctggctaattttgtatttttagtagagacagggtttctccatgttggtcaggctggtctgaaactcccgacctcaggtgatccacctgcctcggcctcccaaagtgctgggattacaggtatgagccaccgcacccggctctttccagtctttttaaagtgtgtgggcatttagcctcttgctagttttacaaacccagcactccatctccctggtttttaattcagtctatcctatatcatccagtattattctgtagatacggaaagatacatatcaactaccatgaacaaccctacaataaacagtattacaattaatgctttgtttgcatatcttaaattattttctaaggctattttgaggcttttgaatgcatagtcctaagttgcccccctgatgatatataacaaaaatttctaatgctttcagacttggattttgactgtttttttaattcatgcactatcttggattcttttttattttttttttgagatggagtctcactccgtcacccaggctggagtgcaatggcatgatctcggctcactgcaacttccgcctcctggatttaagtgattctcctgcctcagcctcccgagtagctgggactacaggcgcgtgccaccacacccggctagtttttgcatttttaatagagacggggtttcagtgtcttagccaggctggtttcaaactcctgacctcatgatccacccgcctcggcctcccaaagtgctgggattacaggcatgagccaccatgcctggctttttttttttttttttttttttttttgataaaatctcattctgtcacccaggctggagtgtagtggtgcgatcttggctcagtgaaacctctgcctctcaggttcaagtgattcttgtgcctctgcctccctagtaggtttttacaggcacacaccaccaggctaatttttgtatttttagtagagacagggtttcaccatgttggccaggctgatctccaactcctgagctcaagtgatccacctgccttggcctccgaaagtgctgggattataggcatgagctcaaaattatttcttgtagtagcaaacctgctaaatcagggataagtactcttcttaaaggccaggtagtaagtattttaagatacgggccttacagtttttgtcgcaattctcaactctgctctgtggtttgaaagcagtggataatacgttaaacaaatgaccaggctatattccaataaaactttagttacaaaaatatgcacctgaaaaaaaaaatacgcacctggctagctttagtttgccaactgtgtgctaaaacatggataaggggctgtagattaaaatgtggaagccatttatatattttcaatcatgctaaattatatcccctgttgattttattgtagtaatcatttttctctctctcctttttcaaaattttaaaatgtcagcagtgatgtaccaaatggatcagccttgacacaagagaatatcagcctcctatcaaacaagaccagctctctgaacctgtcagaggaccctgagggaggaggggataataatgactcccagagatcaggagttactcccagttctgctccttaaaatatgaggagtcctacttttatcttctgctcctaatcagtttgtcgggcataggggtaggagaacgcataacttctaaactttttctcttaagagcggtcagagaaatccaggaaattcaccagaggcaatgtgcacaaacaccactactaaaaacaaaccctgcacatagttcacattaatgcatttttttaatttaaagaaaaagaaaattagcagtatctgcaagcaattcagattaaatttgtttttgttctgtgaatgaactttattttaataactttggacgccttggatccagggctttaaaaaaaaaagatattatatatacactctgtttgattaattgtatgatcttaatgaagtaggttttcttgtattttggtattacatacccagtgtataatttgtataattcctcacccccaatccttatcaattctcaccaccccataaacttaaaacagaccaaaaatgtcagctttcagagaattctgtggtgcttgagaaacagacagtactagactgagttattagaaaatgtgcagcaaaccaacttttcccagagctgttatttggaattctttatccctttctagatcactagcttcattggatacgtatatttttcttgacattgaagctttttgtttgtttgggagggttttatttcttgtttttattttcaacttttcaaatagaattaccaattttgaagtcctcattttcatattaaggatcatttgcattctcttaatataatcagaaagctgattcagtgtttaattagatttaaatgttgatcaagaattaactgtaacttactagcactgaaaatacatgtttggtgtttcgcctgcgttcagctcatggttggaaatttgaagcagtgcttttcaaattaaacttttgctgacatcataggatgctaaaaaacaaggacaatcaactatgttttaaaactgcaacatttgatttgaacttaaaatgaatagagccacattattttaatggatgttttgttttacttgtgaactgattgagtcttaaggatagtttatgaattgatcacttgttgctcagaatcattagtataagtaggtaggaaatagtttgaagtcatttttcatagacttaactgtccaatgttgcaaatgtttcttcatgaaaatattgaaaagagtaaggttttttttttttttaattctgctgcacatattctgatgccatgtgtctgtgcttaattaactaagaccctataaaacgtgtttagtggggactgtttgatatagttgccctctccattcctctatttgcctgatttttttcagtttccctttctgtattttactactaaattagaaagcactggttatgtaataagttactacattgctttggttgagtaaaaacaagagtttatatttttcttgtttcttattttcttaacccttaactcctgctgaggtcataacaacctcagtctaagctctgtgtccatcatactgttaacttaaacaaatgggtggtgggggtgggaagggtaatacagtcctgccattgcctaccagtaggagagtccaaacagaacactcttttgagtagcaattatttaatttgcccagtcaaggcaccgtgtttatatactatttcacattgaatttgattatgccctacagacctggctggtcaaggatttgatatacacatattggcttgggattcgagctttcttttttatttaaataaaaatttatatatatattatatatatacatatatacatagctatatctgtatatatattgggtatgttttaaggattttttcgcatgagcgcagctgttgcgataaattgaccgattgggaggtggtagaagcactgaatgaaggtgaggctttttttttttccagttttcttatacatttgtcttctttttttaaaaaaaaaaaaaaaaatatatatatatatatatatatatatatatatgtatgctttttcttttttttttggcttttgtttgctttttgacttttacttaaaacccttttacatttccactttaaatgcctattgtttattgggagaaggaaagaaacttttgtatgtctgacagagtcccaagatttttcatttctctgcataacagtaaaaggcaacattattggcctccaaccttctttttttttttttttttttttttttggagagggagtctgcttctgttgcccaggctggagtgcagtgggttgatctcggctcgctacaacctccacctcccgggttcaagcgattctcctgcctcagcctcctgagtagctgggactacaggcacgcgccaccacgtccagctaatttttgtactacaaccttcttataagcagatttggactgatcttctcctttgggtatgtcagatcatcctaaattttagaagcagttgattcactttggaattcagaatgattcttgtattagaagataatttgtgggtattaatttttgtttaagtttaaaataaaagtaaagattcattttggatatcagttgaaaccccttagtaactcagtttctgttattcttgttctcatttcctttaaatacacttgttcttggcttttgccattttgattctgtgaagtaggcaggagcagggattaatttatacagtattcctgttctgaacaaaaccagaaaagtcactgtataaacttgacttaaaatagtatctttctcttttcatgtattttcatttgggggaaaaaaaatctctttaattgtaacctgaattcaagctgtacccctccatggtcctacactctagagctaatctggttgggcagaaaggcagaaggatggtatattgtcccattgtgcctataatgtattttaaattggtcattccaccttacctaatggaaattcttgcagctttcctagtgctcatcagcggttttaggaattcactaacacccccaaaatttgttttttgttttttgctttttttccttttccttttctctgtgatatcatgagcctgtaaggacaaatggcatatttgggcataactgcttgactctgtaactacttttttaaaatcaaaattgaaaaggtattaattgcttctggctttttaatttttttttttagagacaaagatgaaaccagataggaaatacagtttttatgttttctacttactaaaatattagtttcttctaaatattactttatttgtatttcactaaattccaaagcaaaaatcagatatctgagatgaacaattttgaatgggttaaggtaggagtaataagcattgtgttcactcatacataggtgagggaattttatttatagcgagaaatataaaagtattttgacttactcttttttcaaggagtcgctaggaaagggtagaagaactgagaataagacatctagattccatttctggtttatatgtagctcttttgcctaatttatatataattttgtcataagataagtccagtaactgtcctgtcttagataacgtacagaggctgaagtgaccaaagatccattccttattacttttctaattaaaagaagagttagctagatttctagtagtagtattctagatattgataagacattattcctaatgccaactacaaatattcaactactcagaatgtatttaaaaaattgtttggtacagcattaatgttggtgattcctttctcccatcttatttcccttcccttctattctttcccatgtatttcttttgcctaaaagaatattggtatgattctcatttgctactttgagtatataactccatcagactttccagagttcttcagggatggagctcaaagtttacatttttccatatatgtctttttttttcttgacctttttccaccctgtaatttccccttgacttacccactgccctccccaatctgcaacagtgacagtttgctgcctcaaaacagagcattcaaatgaattcgcttagccaataacttctgtgaagttgccttttctaatggtgttattactcagtgatgcacaaatgtggtatttgccctactggtaggcaaacaaaggtctggttaagaatggtaacctgctgttttctttaaaggagagccaaagacttgtgctttactctgttttggttttgggggaagtagtagccattttgatcatgaaaccttttagtatttgtgagttgattgtactgtgtaagtagatttatctaaagttaactgttaaagttagctagccttataaaatgtaaaagtaatgaaaattcatcagtttctctaagccagtgaatgtcgtcttttgtaatattgtgtataagcatttgtgcccaccccagcttctgctatcactgtggtcaagtcatgggtctgagtaaaagaattcttgagtatgtgactggtgagaaataactaactatagtcagtacatgtacagattgttaaaattcaagacaaaatactttcactaaaaaaaaggattcgtctcagtaaagaagtattcagttgctgtcacttacatacaaatggtggtgggtagcagtctcaccatttttctactctctttttgctcgttttaaataattgagtaaaggttttatttgtaaaatctatctgtaaaaagcacctgtaacgatttatatgtcattgaaaggaatggcccagttactttttaggagagattaataacctacctggaaattaactgcagtgtttacttagattttttccccctaataagagtctaagtgtgttaaatttttaactgatgatatggttacagtgttgcaaggtgatctcttcccctgaaaaatctgcctatccttttaagaaaaattagacctactaaactaaagcaaattttactttcatcattagcacctaaacaagcaagcagtctactactgtcatcattttacctgagtgcccattttgctgatccacattcatacctttctaccttggacagctatgatttttatatttatttgttgcttcagctcaggtttatgaaattttcctgctgaaatgacttattgggagttgtaggttgattatagttactattaaacattttctcaatttagcttttctgagccacttcaagaagaaagctgtttttgtcaaaaggtactattaattgtagcaagtaaatcttaagatttgaatttttaagattttatttctgtgttcactaaagatctttccacaagtaatagattataattgataagtaatactagctatagtgttaataaagagtaagactatcaccaccaggaataagtaacaccttttaataataaatctattcctaataggtatgttttcaatactgcactgaacaaagtgggtaaagagccctttgaaatcttattgtaataaagggacttacctcaccactggaatccttgttttcagagcctctggattttcagccaaacactgaatttctcctaaactttatccctgaaacatccctagagaacgaactttattttcacaagaaaataaggcacaataagggggaagaacttaaacctcaacataatatcgtgtccaaaaatgtgtatttagaaaaataaaatcctgtggagtttgttatcctaatgtttattttatactagataaggtgacttgttttcttgtattgaggtcttactgtttcagatttgtttttgtttctgttctaactctaagcagacagagctcacaagtctttggcatccattttaggttgtacactcagagtcatcttataactggaaactgtcaggtggtcccccaccccagtgagtgtatgaaagagtcaagaaaaagattggaaacaaactattgggtgaataattggttgctctattattattattattattatttgcctttttttaatcaccatttatttgtgtaatctttctccattgattggctgtcattcttataatatctgaactaccccataaaataattctctgacttaaaggcatttagcttttgcttatcgtttttacatcctctattcaactaagacactgtcttgagagttattttttccagatggatcgttggcctaaattttcacacttctcccctgttcatcctttttcctcttccctgcttcctgggaataaaaggaacttttttaaaaaaattaattagtccacaggtctcattatctttctttatgattaatctatgactttttggtacaagaacaatggaaaaagtgaattaaggtaatgaacaaaacctttcacccacttaaacattttccagttttgagattcctcttcgtgtttgtggtgtcttccccttgttaccccttctgccctttttctctgactatggtaatttggtctttaggctcatatcagtctccccgagacattctgcagtcattatcacctttttgggtggattttattttgttttattttgttttttttaaaaaaataactttttaacattggtgcatatttgcttgggatagagcttgtgtaatttaccaatcgtattgattgtaagtgattgtgccctgcagaggtatatttaacaagacaaaaataatcttggttaataaaggagcccatgagatttgagtcaggttgtaagtgaaatcacttacacttttggatagaatttatactcctgctcttataaatcagtggtagacttaccattttttaaagttttcttgcatttttttgtttttttattgccacagctccctattctttcttgcctgcctccacccccctgttcaggaaaaaaaaaaattgagccttaaagtgacagctgattttttaattgctgaattttgtgaaattttactttttccaagtgtttccaactttaaaaagagaagtgaagacaaataggttggaatggtgaagacaaatggattggaatttcacaggctgtgaataattccttaggatctggcaaaccgtgaagtcttatttgaagaccttatctcctgagagttcttttggagtaggaaaaagaaccctatttgaaatagaccgtttttctcttgtttttaatctgtttaatatttctgatttttaagcagctttcaaaacaagtgtggtggaaaaaaagaaatagtagtaggaagatgtttagggcagcagaactctgggtctaaataagtacatgttcccacttgttgccgatttttgagagtactagggccatctttctcaattttgtattatttgtgtgcatgtttatatcaaagatgcccattttgttaaaatgctatttcctttattaccttggaaactgactcagcctcatgttgctcctaattagtgtttaaggctcccatgagttgcagataaaatgatttattttaacaagtagaaggaggtgattcaccttttggattgtaaatatatgaaaatgtctacaaggtctttatctgctttctgtcagcatttatattaaatgataaattaatgaggaacgtgtgtattttgtaaatgagtgtgtgccatcttattctaatcttgagattactttcttacacgtttttaatggagggggcttttttaggtgaaaaataaagaaatggctaatctgcatgagcaaacacatacttggagtagccaattttgtgtggacatcacaggaattagtccaatcttaaataagctacagtcatattccttcatttgtcacacagtgattgcacattaggagtgagggtagtggttctgagatactagcatcaattcaatgagattcaatggctaacatccagtgtctcggtttttatggcgcttctgaaaattaggaccatctttatgcttaagtgaaaaggacttgtcatggtaacttcctgatgcaaaatgtttttttgtctttccattttttttttttttttttgagatggtgtcttgctctgttgtccaggctggagtgcaggggcacaatctcagctcactgcagcctctgcctccccagttcaagcaattctcttgcctcagcctcccaagtagctgagaatataggcctgcgccaccatgcccagctaatttttacatttttagtagagatggggtttcaccatgttggccaggctggtctcaaactcctgatgtcaagcgatctgcccgcctcagcctcccaaagtgctgggattacaggcatgagccactatgcccagccttgtcttcccattcttgctgacttctgattgtcctgaaatccccacccattagtcattcctcgaagttagtggatataagtaagtttgtctaatagagaccatacgttagtcaacacctcaatggcatgaagaagaaaagggaggaggttgggtgtggtggctcgtgtgtgtagtcccagctactcaggaggctgaggcgggaggattgctaaagtccaggagatcaaagctacaatgagctatgatgcttgatcgcaccactacaccagcctgggcaatggaatgagactctattattctagattaaaagaaatgtaagaagtacaaaaatcaaatgcagcataggtgattttagcaaaccaaatacacaaaagacttttgtatacaggaaaatttgattaagtattgggcattagatgataccaaggaatggcattttcgttcattgtgaaacatgattatgtaaaaaatccatttttttaataaagatggataacacaatagctgcaatttcctttaaagtaggaactaaatatttttaaaaagtaaataatgcagccacgcacggtggctcacaccttgtaatcccagcactttgggaggccgaggcaggcagatcacctgaggccaggagtttgagaccagcctggccaacatgatgaaaccccatctctactaaaaaaaaaaaaaaaaaaaaaaaaaaattagccgggcatggtggtggccacctgtaatcccagctgctcgggaggctgaggcaggaaaatcgcttgaactcgggaggtagaagttgcggtgagctaacaccactgcaccccagcctgggcaacaaagagtgaaactccgtctccaaaaaaaaaaaaaatcaataatgcacattaccagtgaaggttatttacttctcctaccaacaattagcgattaggtgtccattggtatatctgacctcaagggaagggaccatagtaaagaaagcttagggtatgaggagtggtaactgctgcagccatccctgaatgattataaattctggactgggaattacaaaactagccctgtcatcttaatcacctacctaggcctaccctgctcacaagcaatagggtacattctgacctcttgggctgaaacaaaaataccaatagaaatttggtttttatgcccattagtgcttcaatcccaataaccagctaatcttcagtgatcaattagtaaacccctttgccctccagcaagatgactcattcagtaaatggctgccacccttatttggaacacctaccatataaaaagtggacttgtcaaatacccactgaatacccattgagtatttactaaagaaatgtattgagtacttcccatatgcacagcccggtagaggacaaagagttagaaaatactgcctccacccgcaatgaactttaattctggaacttgacaaaacactaaacagaattaccaaagaatttttcaaccatacttgtcctcagaagagcaaggagcagtgagatggtatccaaggaagacttaaccttgcctggctggtcaggctttcctgaggaagttgcattgaagataaaacttgaaaaatcatgggggagcgggagaaaggtgtgtgggagacaagaggcttggtcagagaaaatagaacgtgtgaattctctaagggaagaaagagcctgaggtgtggaaactggaaggagttcattaagactagaggaaaaggagtgacacagtggcttgagatgcacagccggatagatcatggaagcctgtggaccgtgcttaagtgtttggattttattctgaaagtaaacggaatgcaaagaagggtagtaagcagtggaatgaagggaccagatttgtgcttcttgggagctgatcataatcccaaaagacaaccccaaatattgaaattctgaaagacaaaagttccaaagttataattttggggaaaaaaatgtaaattctttaaaaggcatttacttttttttttttttcctcgagacggagcttggctctttcacccaggctggagtgcagtattgtgatctcggctcactgcaacctccacctcccgggttcaagcagttttcctgcctcagcctcccggagcacgtgccatcacccccggctaatttttgtatttttagtagagacggggtttcaccatgttggccaggatgctctcaatctcttgacctcgtgatccgcccgcctcggcctcccaacgtgctgggattacaggcgtgagccaccgcacctggccctatttaaatttttaaaaggagatttagggccaggcgcggtggcgcacgcctaaaatcccagcaccttgggaggctgaggcgggcggatcacctgaggtcaggagtttgagaccagcctggccaacttggcgaaaccccatctctactaaaaatacaaaattagccgggcatagtggcacattcctgtagtcctggctactcaggaggctgaggcaggagaatcgcttgactcgggaggcagaggttgcagtgagccgagatcttgccattgcactccagcctgggcgacagagcgagactccatctcaaaaaaaaaaataataaaagatttatttgagaaacaggaaaacacgacagcctgggcaacaataagacctgtgtctactaaaccatagtgtggtgcatccctgtagtcccagccactcaggtggctgaggcgagaggatcacttgagcccaggaaatagaaactgcagtgagctatgatcacatcgtcacaccactgcacaccagcctgggcgacagactgagaccctgtctcaaaaagaaaaaaaaaaaaaaagacaatacttcataggccaatttacataataaaataggcaatgatacatttgtatttaacaaacacggatataataacagtcacatggatgtaacagttaagagcagacaaaccatatttataagtaggtcaaaaagcaaaatgtataaatgcatattactgtggttggttattgtacccagcattataatcgcagtcatatgaaatatagtggcagacaactccaagagttgatgaaatcaatcaaaaactacaatgagctgagtgcagttttacactgctgagtgcagaattacatcagtaattccagcactttgagaagctgaggcagctggatcacttgagcctaggagttagagaccagtgtggcaacataaggagacctcgtctctacaaaaaatagaaaaattagctggtcatgatgatttgtgcctatagtcccagctactggggaggctgacacaggaggattgcttaagcccaggaggttgaggctacagtgagccatgattttgccactgcactccagtctggatgacagagtgagaccctgcttcaaacacacacacacacacaatgggtcaccactgcatatacagtcgtcccaaaacctgagatcttgagaaattttacctttcataaatacagacatacaaaaaaaccccttcatttattgaagaagtttaaacatttttacattgagaaccagggaagtgacagcctcaagacctggcgagtctctggtttaagtcctggagtccaaaggcctgtgagcttgaagttcttttttttttttttttttttttttttgagacggaatctcggtctgtcaccaggctggactgcagtggtgcgatctcggctcactgcaacctcggactcctggggtcaagcaattctcctgcttcagccttctgagtagctgggacgagaggcgcacaccaccacgcccagctaatttttgtatttttttttttttttagcagagatggggtttcagcatgttggccaggatagtctaaatctcttgatactgtgatccgcccccctcggcctcccaaagtgctgggattacaggtgtgagccaccgtgccccactgagcttgaagttctaatgtccaaggcagcagaagaaaagtctgtcacggctctcagagatttctccacctagtccactcagactcacacacaaatgtccttgggaaacaccctcccagacacatccaaaataatgctttatcaggtttctaggtatccctttatccagtcaaggtgatacctaaattaagtccacaagtctacctattgtcagcctggcaccagtgatgcatctccttaacccatacttaatttcctgcagcctcaacctcccaggctcaagtaatcctcctacctcagcctcctgaagtagctgggactacaggcatgcgccacccgcctggctacttttttgttcacagtgacggtgtttggccatgttggccaggctggtctcgaactcctgagctcaagtgatccgactgcctcggccacccaaagcgctgggattacaggcgtgagccaccgcacccagcctccctttgctgtttctctttcaccacctacaacttcccaaactaatataaaagcaacaagctttgaccccacacaactctctcttgctcagcctccaaagaatagccttgtccaatgtttctgttcatacaaggtgtcaattcttctggatgagtaagcatttttcaccttacttgataatctaaactttctatttgggaggaatttaaagtgctatatttcctgttattaagttagcagaactactctggacctggattttttcaaacatgaatgtttatcaagtacttggtacattcaacaggacatgttcaataaatatttgctgttttgatttggtttccctgaagccaaaactgaactttctaacaggaggatttgggcaaattccagtgagatgccttgagagcctcagctaaatgctgctaaatgataatgtaggatttattttggtaagtttaatttcaccttaattaaaatgtcatgttcacctagtaaactgggaacccaagggagttggagactgctttttgtgctaaatgttttgccaaatttccatggaagggttaagctttgagttattcagtaaccacagcagaagctgggtcctatctcttccctgccaaggtcttattcttgagtccaaaggaaagaacagaacagcccagggtatgaggcaatggacatggacctgctgaattacctgctcatggaagttactactgaactggaagcagggctagggaaagaggaattttatcactgatcttgaaggaagtactaaaaaaagagagggtaatcaactgctatgttctctcctcttcatggttccttgaacctactcctaacacagcaaagcacaagccttccaatcttttcactcagaattgagaaaaacagtgccacacagaagtagggagtccttttcaaaaactgatttttttgtgataaaagttcttaagatgtctatctctttctaatatttccagttctagaaatattagaaatttccatgaaaacgttaatttaaagaaaaattatttttctttcttttttagagacagggccttgctctattgccaaggctggcgtgcagtagtgtgatcatagctcactgcagactcaaaatcctggacttaagaagtagctatggctggccaggcatggtggctcacgcctgtaatcccagcactttgggaggccaaggcgggcggatcacaaggtcaggagatcgaggccatcctggcgaacacggtgaaaccccgtctctactgaaaaaacaaaaaattagccgggcgaggtggcgggcgcctgtagtcccagctactcgggaggctgaggcaggagaatggcgtgaacctgggggggcggagcctgcagtgagccgagatggccccactgcactccagcctgagcaacagcgagactgcatctcaaaaaaaaaaaaaaaaaaaaaaaaaaagaagtggctatggctacaggtgcacgccaccacacccggctaattttttcatggtttgtaaagatgggatctcgctatgctgcccaggctattcttaactcctggcctcaagccatcttctagcctcagcctcccaaatcattacaagcatgagccaccatgcccaacctaaaatatctttattatatttaaatatacacaaaaaatacttttcagaatacctatgtgtgtgtaaacacacacacagtcacaaattagtttgcccagcatacaagctctttttttctttcccagtctaaacagtctaagatgaaccaagaggaaatggatctgggatcatccaaaccttgatagtataataaaagccaaggggagctgtgtgcagtgagtaccagagactaggctggtggtaaagtctcccagagaccaatgagaactcttgggagacctgcaggagaagcatagtggagagggcgaggcagcccgggatccagcagatgatcactgcacccactatcccttgactgtttcctgactgtgtcttcctccaaaccactgatggcaatgttggataggacagaatgaggcacatggcttctcggtccggaaacatgattatagatccgtttctttcattccagggcatgggatctcagtttcccaaatgtgctgggtccaagaggtgagaggcagggaatacctgggctgataacttccagggcttaggatcagtctcatcttcatcatgtggcttatagaccgacctgtggaaaaagaaagagctagtgtgctgaatgcccaggctgagttgtgagtatgctcatttgggatgtgcatcaaataaaatatggatagacaggccgactgtggtggctcatgcttttaatcccagcactttaggaggctaaggcaggaagatcgcttgagaccaggagttcgagagcagcctgggcaacatagtgatttcgattctacaaaaaacaaattagccatgtgtggtggagcatactgtagtcccagctgtggaggctgtatatatattatatctatattatatatagatattatatatagagagagaggggtgggggagagagagagatagaggcaaaggaaaatgtggtagtccctgggttcatttctgggcactggatttggagggaattgtgaacaagtttgacagagactatccagaggagaaccagatgaaaagcagttggacactgtgggttgtaacatgggaagtcctgggcatttctttcatatctatcgtgctgggacacaagggctttgagagaagcagagggaggtttgaatctcagctctgctagctttgcaatttggggcaaataactcttgtaaatagtagtgttctcatctgtaaactgggcataattagtatctttctggtagagctgatgagagaattatataagctaatgcctgggaagcatttagtatagaccctgatatatagtgtttttaaatagcacctattaagatggcacctatatgatcataaatcatattcaaacttttaaagagtctgacctaggctaatgtctaacactaaagtaatggttaagttctagactactgaatattatacagccattagaaactactttcacaggcagggcacacctaaacacctctttccacctgcagacccgttctccttttctcccctgtcaccagccaggcactcagcctgcctcaggttcctctttggtgctgccactgccctcatcctgccctgctcctcttctctccccaagcctctgtgtgaatacaacactgacacccttgtgtcataaagtcaagacatattgaataggtgatacattgacatgttcaacattagaaaactaaataagatggtacatattgataagtctactcctacccttgtctctagccacccctcaccccatcatcctcactttgtgttacaaaaagcacagcatactataaacactttctgcagcttgctttttccccacataattatcctaaggacccttccatatcagtacatccatatagagcatcctcattcttttacacaatggcacagttttccattgtggggatgtgccttggtttatttaaccagtctcctacagatggaagtggtgtccaactttttgttattatgaatcaggtcatggcagctaaccttgctgaaacccatgcaggtgtagctgtaggatgaatttcctgaagtggaatgtctgattcacagggtacatgcatttgtaattttggtgtttccatgtttccctacaaagcacctacaaagacttatggcactttgtaccccgaagagcaaaggatgaaacagcttgtttcctcacagcctagtgtcttgtctaacttaatctcttttaattctaatggtttttgtgataatcctttttagagaaacatggaaataacagggagggaggagtgctttaaaagtcttgcaggggctggatgtggtggctaacaccagtaatcccaacaatttgggaagccaaggcaggcagatcacttgagctcaggagttagaggccagcctgggcaacatggcgaaaacccatctgtacaaaaagtttttaaaaatacataaataaagccaggtgcggtggctcatgcctataatcccagcactttgggaggccaaggcaggcggatcatccgaagtcaggagttcaaaaccagcctggccaacatggtgaaattccgtttctactaaaaatacaaaaattagcagggcatggcggtgcatgcctgtaatcccagctacttgggaggctgaggcagaagaatcgcttgagcccaggaggtggaggttgcagtgagccaagactgcgccattgcactctagcctgggtaacaagagtgaaattccctctcaaaataaataaataaatagccagacacagtagcacacacctgtagtcccagctacttgggagactaagatgggaggattgcttgagcccaagttgtctagggctgcggtgagctaagatggtgtcactgtactccagcctgggcaatagtgagaccatgtctcagaaaaaaagattaattaaaaaaatttttgtaagtcttgcaaaaggatcattgagggaagcttaaattagcaggtgaaaatttgatggaaaacaatatatttgcatactctcaagtatgtgaagtatccccacaagacatttaacaaaaggggaaacattgtaattttacagcagagaaacttggcagacacaatcttgtaatccaagttaatcaccagtgatgggataaattaacatctgtacctcctgatgcgatacactgagaaggacacagtattacctctgttgtattcctgccccgaaaaggataacttgaatctaatcctgaagaaattttagacataccaaattgagagacagtcttcaaaattaactggcctatatgcttcaaacaagccaaaatcatgaaagaaaaagagaggaactgttcccatccaagtactaaccggggccgaccctgcttagcttctaagatcaagcactttcagggtagtatgaccatagacgagaggaactgttccaagctgcagaagactaaagagacatgacaactaaatgcaatgtgtgctcctgccccagggaaaggagaaaaaaaattcttttcttttttttttattggctataaatcagtgcttcccaaagcatggtccagggaccctaggagattcagaaaacctttcagtaggtatatgaagtcgaaacgatttcactttatttatttatgttttgagacaggatcttactccatcacccaagctggagtgcggtggtgccatcatggctcactgcagcctcaaccttccaggctcaagtgattctcccacctcagcctcctgggtagctgagattaccagcgcatacctccatgcccagctaagtttttgcatttttttatagagatggagtttcgcatgttgcccaggctggtcttgaactcctgggctcaagcaatcctcctgcctcggcctcccaaaatgctgggattactagtgtgagccactcagcctggccaaaactattttaatatgtaactattttaataataatatttagatgttctttggcaagactataaaaggattctgaaacaaagaaggtgaaaaccattgctttgaaaaccaggtgtggtgactcctgcctgtaattccagctagtggggaggctgaggcaggaggattgcttgaggccaggagtttgagaccagtgtgggcagcagagcaagacccccatctctaatggcaacagagtgacaaccagtctctaaaaacattaattggatgattggcaaaattagaataaggtttagagatttttaaatagtactatatttgaaaataatgctgggcgctgtggttcatgcctgtaatcctagcactttgggaggccaaggcagacggatcacttgaggtcaggagtttgagaccagcctggccaacatggtgaaaacccgtctctactaaaaatacaaaaaaaattgccaagcatggtggaaggggcctgtaatcccagctacttgggaggttgagtcacgagaatctctagaacctgggaggcagaggttggaggtgggctgagatcaggccactgcactccagcctgggcgacagagtgagactccgtctcaaacaaaaaaaagaagaagaagaagaaaagaatatgcaccaggcagagtggcttacacctgtatggagtctcgctctgtcatccaggctagagtgcagtggcgtaatctcgactcactgcagcctccacctcccgggttcaagtgattctcctgcctcagcctcctgagtagctgagattacaggtgcataccaccatgcccagctaattttttttttattttttagtagagacagggtttcactgtcttggccaggctggtctcaaacccctgacctcaagtgatctgcccacctcagcctcccaaactgctgggattacaggcgtgagccaccacgcctggcagaacacttttaaaatatatatataatttaatttttaacatttgagacaggggctcactctgtcaccaaggctggagtgcagtggtgtgatcacagctcactgcagtctgaattcctgggctcaagtgatcctcccacctcagcctcctgagtagctgggactacaggctcatgccaccatgcccagcttattattattattttctggagatgggggtctcaccgtgtgtggggtctcacagttggtcttgaactcctggcctcaagccttggccttccaaagtgctaggattacagatgtgagccactgcatccagcctggatgaacaaattaaacacaaaccctgatgttatagttcttaattccttgacctggtagtatctgcatcctaatcttttccagcgatgttcaccaaatcacctatatttttgcagggcccctcatctgccctcccccaaggaccttcttggcaagacacaaacctcataactcctataagctggaacaataggtctcaacagcatgttcctgaaacctcaaggtctttgtatttctgatttctctttggacagctcttcctaaagatattcatatggccccctccatcatttcattctggtttcctaacaatgattcctaagggaggcctttcctaccaagtgttctcagatggtgccctccccacttcctcccactgcttcctatatccttgccctgctatagttttctctatggaccttattaacatctgactggcacgttacatatttattttttaaatactgattttttttttttgagatggagtcttgctctgtcacccaggctggagtgcaatagcacgatctcggctcactgcaacctctgcctcctggggtcaagtgattctcctgcctcagcctcctgagtagctggaattacaggtgcccaccaccatgcccagctattttttgtatttttagtagagatggggtttcaccaggttggctaggccggtctcgaactcctgacctcaggtgatccacctgcctcagcctaccaaagtgctgggattacaggtgtgagccaccacgcttggcctaaaatactgattctttatgtgattgctgtatgtctcccccgaatggaatcccagccccaagaacagtgtctgctggcacaagcagcactcgtgtatttgttgaactcaagtggttgaacaggagacttttcaatagtctttaatctagggtgacagatgagcctctgggcattctggggccctttgggacagttctcggctactgttcacactgcacatggagggcttcaaaggatccagggtctgaatcagccaagaacttagacacagcttcagttcaggagagatgtcctctctcatgaacgaagagctctcgaaaatgcctatgactgcaacaacaactacaaggagtccttgatcacacagcaggaggcacatgcgccctgtgaacttggtggctgcagtccttgtgatggtgcttttggctatttcagaagagggaaatgtaaacaaacctgccctttatctccactagtttgaatttacccaatctccccaataactaataaaaataacgatacacataaatataatttagtttgtttttatttcagcagttgtacgtgggtttttcacctgccccgcattctgtctcctgatcccccagtagagttttgctaagtatttcccagctgctcacaccccttagaaacgcgcttggcatgcaccccgaggccctgctcttctctccctgtcccaccacttcagggctgctggggaatgggtctctctgtgggccacaggtgtaaccattgtgttttccttgtctgtgccagggacaccttggcactcagatgcctgaaggtagcagcttgtccctctttgccttctctaattagatatttctctctctctctccctctctccataaagaaaactatgagagagggtgggtatgaaccaagtttgtttccttggttagtttcctaaccaagtttgagggtatgaacatactctccttttccttttctataaagctgaggagaagagtgagggagtgtgggcaagagaggtggctcaggctttccctgggcctgattgaactttaaaacttctctactaattaaacaacactgggctctacactttgcttaaccctgggaactggtcatcagcctttgacctcagttccccctcctgaccagctctctgccccaccctgtcctctggaacctctgcgagatttagaggaaagaaccagttttcaggcggattgcctcagatcacactatctccacttgcccagccctgtggaagattagcggccatgtattccaatgtgataggaactgtaacctctggaaaaaggtaagaggggtgagctttccccttgcctgcccctactgggttttgtgacctccaaaggactcacaggaatgacctccaacacctttgagaagaccaggccctctccctggtagttacagtcaaagacctgtttggaagacgtcatttcaagtgctctccctcccaccccacctcttggggtaaggcctttcctaagctaccccttgggtccctagcctaagaaacaagggggatgtcatccctggtgtaaagatgctgtgcaggaagtcagcactcacgggatccaggggacgctccaaggggaatccccagggcctgccatccatccgggaagagagcaaatgctacccatgaggacctcctcactccctttttgctctttcttccactcagatccaccccactccacccccacccaaatcccagtgacctttgactaaagggccaaaactgcttccttttctcacaatgagagttgtccctccctcaatgccacacacactcccttcttcatctgagttgtcacaggaggctagaaacggggtggtggcacaactgtcttggttttaatttgtgcttcatagccctcccagggtcctctcagcctcaaattgcatttccaaatgtagttgaaggacagagtgggcaaccgaaggcagtggagatgggaagatgaatggcagggtcctctcctctctctctctgcttcttcagcctgccttccacatctcccttggtgccgctgcttctctccggctttgcacctctgttcttgaaagggctgcagaactggactcagaccacgcaagaaggcaagtccccctcagctgccccagcttccagccagccccaggcttgcccaacggaccacgtccgtgaatctgcactgggtgcctgtctttctctcccaggagaagatgggaagatccagtacccacacacagacccccttgtgtacacgcaggaaccataaaccagctggaggcagcccctgccccaccctgtcttatctacaaaaaatattacaagagactttatctcttgatttgcttcatcgagtgtcccaactacctcatttttttaaaatgtgaaattagcttcatttaccttcattgaatccatgttggcgactattaaaaattccaggcaataaaaagggatgagagcctgaactaaagcagtggcaataactggtgaaagagtaaaaaaacagaactgattgactctggggtgaactgattgactctggggtttgactaaatgaggaggagagagggaggaatccagggtgattctcaggtttctgtacgggattcactgagcccactcacaggagcaggcctgtgggggagaattaattaccagttcagtttggtcctgtttccctgaagaacttgtaggagttcctggtggaactgtccagcaaatagtcagtctggagctcagtggaagggttagggctggagctagagatgtaggaatcttcagcacacagatattgccattgtttttgtttgtttgtttgtttgttgttgctgttttgagacacagtctcactttgtcacccaggttggagtgcagtggcacaatctcagctcactgcaaccttcgcctcctgggttcaagtgattcttctgcctcagcctccctagtagcttgggactacaggtgtgcgccaccacacccagctaatttttgtatttttagtagagacagggtttcaccatgttgtccaggctgatctcgaacacccaacctcaagtgatctgcatgcctcagcctcccaaagtgctgggattacaggcgtgagccaccgcacccggccagatattgcctttgctccatccatttcttcttacttctcttgtgttgctgaaatctctctgctgcatctatcagagtccttccccaaacagtttctgtagatggctccccctaccaccctgactcttcactgggcactaaagccgattttttaggcatgcacattccatgtcacaaacaggaagcttctcattcttttttctcccagcgtggggaattgagcacataatactccaaataaccatcagatgattctaattccaacatgaccacgtccaggcaactgaactgtcccctggcaagaagtctaggactgaacctgtcccgggcccctgtacttggttcaaaggatttagcctttctcttggccacaccaggtgggctggaatcctctgctttactggggcaaccctgtggtgggcagtggggctaggggttgcagcctagcttaacttggcattttgtctccttgcaggaaggtttatcttttgtccttgctgctcattggcttctgggactgcgtgacctgtcacgggagccctgtggacatctgcacagccaagccgcgggacattcccatgaatcccatgtgcatttaccgctccccggagaagaaggcaactgaggatgagggctcagaacagaagatcccggaggccaccaaccggcgtgtctgggaactgtccaaggccaattcccgctttgctaccactttctatcagcacctggcagattccaagaatgacaatgataacattttcctgtcacccctgagtatctccacggcttttgctatgaccaagctgggtgcctgtaatgacaccctccagcaactgatggaggtacgaccaaaggtcttctgcccagccaccttgttaggagcacctttggggcttccataggcccaagtccaatgattcctcaaccaacactgcaggccactaggggcgctcattatgcattacgattccctttgaacatcactgtgttataattccctttgaaaatcattttttaaaaaattagccaaggaatcttggctatctactttttaaatcctggtttcctcttttgagcaccttaaaatgggggaaggcttgtatcttctctcaacttcttttcagtaattctttcatctatatgtttactcattaatttgatcatttatttatttattcattcagcacttcctctgtgccaggcaatgtgtagtgccagtccctcctctggtggaagaagagtagctttaccatatggtgacatcaggcatataggctctcgtggaaaaaaattctaggatagtatttttttttttttgagatggaatctcgctctattgcccaggctggagtgcagtggtgcagtctcggctcactccaaactctgcctcccaggttcaagcaattctcccacctcagcctcctgagtagatgggattacaggcacacgccatcacgcccagctaatttctatatttttagtagagatggggtttcaccacgtggccagactggtctcaaacttttttttttttttttttgagacggagtctcgctctgtcatccaggctggagcgcagtggcacgatctcagctcactgcaacctctacctcccgggttcaagcaattctcagcctcagcctcccgagtagctgggattacaggcccccggcaccatgcctggctaattttttttcttcttagtagagatggggtttcaccatgttggccaggctagtcttgaactcctgacctcgtgatccacctgccttggcctcccaaagtgctgtgattacaggcgtaagccaccgcgcctggcctcaaactcttgacttcaagggatcggcctgacttggcttcccaaagtgctgggattacaagcatgagccactgcacggggcctaggatggtatattgagaccaggggcccaggaaagccaagagaagcctcaaggacgtgagagtgttttctggctctgggaagtatggatcatttcagctcagtgacttagttcccacccccttccccccactgccttttgtgggagggaagtagggcatgataagatgaaatgtcatagattgattgatcactgttggcctctggggctatgacaagtcatggatggaaacactagatctttaatctgtccttggcttggctgcatgacagtctttcttcaagttggatcacactttggaagcagagttcatcaatagggaggcatgagtcccttcaagatggtatacggtgcttatttgaaacttggacactaaagtctgtgggtcttaggagggttccttctattctagtggtcaatttccatggaacttcatcacctttgctcagggctctggggtgagttaacccaagtcttcactctttgaaagaaattgtagatttaaaaactctgaagacacataatactgccttctctgggcccttcagtcatttttgtatacattggtactggtctcaaagtacttccatatcactcatgtctctgtccccaggtaagatcttaaatgtaacccttcctacaagaagaacagaacagaacactgcttccaaaccacacatgttcctttggtcctcccctctacacaaacgccatgtgttgggaaagcagggtgagactgaatctctctggagaaaagagagattcagcaccaagcttttgatcaaaagcataatccccccctaaaaaaagtgcctattggagcaaaatcaggaaaaccaaaggcagagaacagataaaaccaaaaggccttttgtagcctgaggagagagcatggaaagggcaggaggggaacagcctcacccattttgccttggggatggtgaaggtgggcattgggggattccaacttcaaagcatggatgacttctaagtccttttcagccctgagctcttagattctgagcctgtttaatcccttgctgatagattcactcttcctttttcacccctaccaccagtatcccagagcctccatgagcagctggccccagtagatgccacaaaagtgtttgttacgagaaggacaccgtcctgattctcttctctgtccagaatcaccaagaggacttttcccattccagcaagaaaacgtctgtgtgttgatctagaggcgtttagagactttaggtggcaacctagtctctctttttccctttatccttcctacccttcattcttcttttatccttttattcatcagaacacaagagttgagcatttatgctgtcccaggtactgtgcttgaaggagttaacaactgaggtggctattagtcagagactgaccagcatgtgctcaccacccatgttaactaggcagcccaccaaacccaccaccatttttttttgacttctataggtatttaagtttgacaccatatctgagaaaacatctgatcagatccacttcttctttgccaaactgaactgccgactctatcgaaaagccaacaaatcctccaagttagtatcagccaatcgcctttttggagacaaatcccttaccttcaatgagacctaccaggacatcagtgagttggtatatggagccaagctccagcccctggacttcaaggtgagttgcagatgttacccctgacctccgagttcttcctctccactcagagattgaggaggtggagaaacagcatccaaattcacactgctttgctgctgaagactgctggagggctgactaaaagttagaacccctgcaatagttattcttacttgaaacctgagaaatcaaaggtatccatgcttggattgtagtgactgcccagaaaacatgaattaataatcaattcttcattccatccaccaacttcaaatatataccaaagggtgttttgaagatgccagttctacaagatatcttacttaatttgaactgttatcatggtcaaataaagttggtacatgatgcatgttacattctcctcttggagattcatgaagcacatgggcctatgaaggttctgagaaactctgcaacaaagaaatctgttggctttattcaatcggcattcctcaaatgtatttgactgcatgggcatttctctcctccatataacctgccaaccccatataacctgccaaccccatataacctgcaatcattcattgcttcccctggcacatgccttggaaattctacttttgtgagttaaggttttccaaagtcagagaaaataatattttatcttctttttcccagactattttcgccttccttcttttcatttatttcttcctatttctttttgttctttttcttctgataatatttattaactacaggaaagattcatggaactatattagatatgtgaggcttccccaatttgggttagagcaatggcttcttaatcaaatggtgggaaaggacagagggatggtgagaaaaataaaatgctgcctgggaaaatggagaagccaattgaatagcacaggtgagtaggtttattttctgttctcctcaggaaaatgcagagcaatccagagcggccatcaacaaatgggtgtccaataagaccgaaggccgaatcaccgatgtcattccctcggaagccatcaatgagctcactgttctggtgctggttaacaccatttacttcaaggtactcagaatggccctggagagaccccagggacttcctcttgctcttcagcttaccccctttttttttaaatggcgagaccgaagccctgagagggcaaatggactgccgaaagctacacaggtacaggtcagcagggcaggtcaatctattatttatttatttatttatttttgacagagtctcgctctgtcgcccaggctggagtgcagtggcgtgatctcggctcactgcaagcttcgcctcctgggttcacggcattctcctgcctcagcctcccaagtagctgggaatacaggcacccaccaccatgcctggctaattttttggtttttttttagtaaagacggggtttcaccgtgttagccaggatagtcttgatctcctgacctcgtgatctgcccacctcggcctcccaaagtgctgggattacaggcatgagccaccgcgcccggcagattggcttctttcacctagtaaaatgcatttactgttcctttgtgttttcgtggctttgtcactcatttcttcttagcatggaatagcattacatttggtctggatgtaccacagtctgtctattcatctactgaaggacattttggctgcttccaaggtttgacagttatgaataaacctactcataattccatcattctgacacagccattgttaacctttttgtgcatatcccgccagtcttttttccgaataattatatattaatgtaacactataatatggatatgtcttgtgtcaataactatcctcctatgaatgtttgtgttcttactttgtgattctcttccagggcctgtggaagtcaaagttcagccctgagaacacaaggaaggaactgttctacaaggctgatggagagtcgtgttcagcatctatgatgtaccaggaaggcaagttccgttatcggcgcgtggctgaaggcacccaggtgcttgagttgcccttcaaaggtgatgacatcaccatggtcctcatcttgcccaagcctgagaagagcctggccaaggtagagaaggaactcaccccagaggtgctgcaagagtggctggatgaattggaggagatgatgctggtggtccacatgccccgcttccgcattgaggacggcttcagtttgaaggagcagctgcaagacatgggccttgtcgatctgttcagccctgaaaagtccaaactcccaggtttgtctaggaaggagtttcctcccttctccacccgcaaggtagtctgaccaaaagtggaagagttggagaaagaatagaaaggagcaacaagtcaggactcctggatactgatcctagtttctactgctaatttgtggaaatctcttttccttttgagacctcagtttcctcttctgtaaaagggaagtttgttcttggatctccatgggcccagctagcactggtgccctgtgagtctgtatcaggtagaggagatgggaccaggtggagaggaatttgaaagggcattggaattcagagcaaagagacagatattaagagctggggaaatgtggttcccattacacaggcctcactgacatttattattattattattattacttgagacagagtcttactctgttgcccaggctggagtgcagcggtgcgatctcggctcactgcaacctctgcctcccgggttcaagcgattctcatgcctcagcctcctgagtagctgggattacaggcacacgtcaccatacctggtaatttctgtattcttagtagagatgggtttcaccatgttggccaggatggtcttgaactcttgaccttgtgatccgcctgccttggcttcccaaagtgctgggattacaggcgtcagccaccgcacctggcacattaaaatatcttttaaagaagttggctggccagggtggctcacgcctgtaataccagcactttgggaggctgaggtgggaggatcgtctaagcccatgagttcgagaccagcctggacaacatagtgagatggtctctacaaaaaataaaaaaaattagccaggcatggtgacgcacacctgtagtcctagcttcttgggaggcagagctgggaggattgcctgagtccgggaggtcaacgctgtggtgtactgtgatcacaccactgcactccagcctgagcaacagagtgaggtcctatcactaaataaataaataaataataaaataagtttacgatgttaagtaattagatttatctttattgaccttttttttttttttttttttttgagacgaagtcttgctcttgtcccccaggctggagtgcagtggtgcaatcttggctcactgcaacctccaccccccagattcaagtgattctcctgcctcagcctcccaaggagctaggattacaggcgcctgccaccacgcccggctaatttttgcatttttagtagaaacggggtttcactatgttggccaggctggtcttgaactcctgacctcaggcgatctacctgccttggcctcccaaagtgctgggattacaggcgtgagccactgtgctattgggctgtctttaagctagttttgaaaactaaaaatgttgccagactggaaagaaagatgttccttctggatggagtgagttttttctgtaagaacagagtcttgccgtttctctctcccacaaaaagctgaagcctgagaatgaattatcaggagccatgctgaacaagcccaaagtacttttattattattattattattattattattattattattattatttttgagatgcagttttgctcttgttgcccaggctggagtgcagtggcgtgatcttggctcactgcaacctccacctcccgagttcaagcgattctcctgcctcagtcttccaagtagctgggattacaggcatgcgccaccacacctggctaatttttgtattttcacgatagagacaaggtttcaccatattagttagagtgtctccaactcctgacctcaggtgatctgtacaccttggcctcccgaagtgctgggattacaggtgtgagccactgcacccagcccccaaagtactttattatttttaacacatattcattgtgagagtatgattaggtgaagatttaggatttcttcttatgtttcaaaaagccccaaaggatctcttaatccaaactgaattcccatctgtgggttgaagccaactttctcccatctcacaaagacttctccggtcttccttccaggtattgttgcagaaggccgagatgacctctatgtctcagatgcattccataaggcatttcttgaggtgagtacaccttccccactctcttagggtacagaaaggagatgcatgaacagcaggaacacgtggaaaaggcctgtttccagtgttaaggcatgcaaaaggcctccacaggcctgctataatacagccctctccaaaaccttcatggtgtgattgttctgccttccctcccactacctcttctgtagcaggtcaagcgggaacacaaacatttagggagggtgatataggaaaagaagccagcaaaggccatcaagaagaaatttacagcatgaggagaaccagaagagtatggggtcgcagaaacccagggagaatttttttttttttttgagacagagcttcgttcgctcgttgcccaggctagagtgcaatggtgcgacagctcactacaacttctgcctcccgcgttcaagcgattctcctgcctcagcctcctgggtagctgggatgacaggcatgtgccatcacgcccggctaatttttgtatttttagtagaaacagggtttctccatgttggtcaggcaggtcttgaactcccgatctcaggtgatccacctccttggcacccccaaagtgctgggattacaggcatgagccactgcacccggccaacctagggagaagttttaagaaaatggatagcatctagtaagaagactcctgggctgggcatggtggttcacacctgtaaccccagcaccttgggaggctgagatggaagaatcacttgagcccaggagtttgcaaccagcctgagcaacatagtgagaccctgtctctaccaaaaaaatcttaaaaaaaaaaaaaaaagtttggagactgcccatagtttacctttccctgaggacagaatagtgtggccacatgcctaattgtaatggatgaagagcaaatggaaggtaagaaagggaagctggtgagtgtgcatcagtgtcttaaagtgtgctccaactagagcactagactacactggaggaaacgaaaaggtggtcaaataaatgcatatcctctcatgggagatgaacagtacacactgacatgctgaggtctgacaagtcccacagtaaagaagacggttgaatatcacttaacgtgttcccccaaatgagatgtgcatggaaccctgtgttagagtaatagccgtgtacagcctgtggaacttctggttctcaagtaaacactaaactatggaccaacagcagtagttatctggggagctttatctttggagattctgggatgggccctgagaatctctgtatgtactaaactcctcaggggattcttatgcacaatgagatttgggaaccactggtatagactattttttgcgggagccaggctgtgagggataggagattggacaatggtagagatgttcctagaatcaaagaaatcgaaaagaatgaaggttgtagtcaaagagaaaggtttcagaggatggtgctaagtaaatatagatccagggatcaaactcagaggaaagtggaattttaacgggagcgaggaaatgtgatagcttgaaagaacacaaggttataatctgagaaaaggatgctattaatataatttcaaaggtagagtagttctgagatggcaagtccaaggtgtagccatggacaggtttgcttaagtggaatgaaggcaatgctcattaggtttgatgaaagaaatgggagactagggtgttgaacgggtctcctaatgagatttttttttttcattgaaatggagtcttgctctctcgcctaggctggaatgcagtggtatgatctcagttcactgcaacctccgcctcctgggttcaagcgatcctctcgcctcagcctcccaagtagctgggactacaggtgcccgccaccacgcccgactaaatttttgtatttttagtagagacggggtttcaccatgttggccaggctggtctcaaactcctgaccttaagtgatccacctgactcggcctcccaaagtgctgggattacaggcatgagccaccgtgcccggcctactgagatattttaattgcctcaaatgatagcaggagttggagtggacagaaaggctaagtgcaaaaatcatcagtgtggggatataatctataggacaatgaatgtcaatgacctttaagacaatagcaagagtagaggtattgaggtcagaacaagggattttacaagagtgctgtattaatggttttggaagttaagatgacactgctcacaccctctttcacatggatttttggaagaaagaacacttaggaagactgcaagggaaattgagtcctcagggttttaactctcattgaatatcctctggtaaggactccagttagaagtggtcaactcagacctccttgaggggtctgagttactattaggaagaagcagaggtctggattcattttatccacctgagcccagtacacaatatgtaagatttttccatggttcttacaacaaagccgttttctttgaaaaccttgggaatccttaataaacaggaccccaactaattgtagacctgagaagccattaaaaaccagaatctgatttgaataaaaggatcctggtcatgcaaacactctagtctgctaataagctaataatttagtgctggaatgagcatgaaataggtaatatggggagatagcgggtaaggaagggaggaacaaaggaaggggaaggaagagtgagaaggaaggagaagacatcatcaaccagctccacaaaacccagggagccggttaatcatgtgctttcattaagagcagaaacagagttttagtgatattctgggtcctgaggcaaaattttctgaaggtgtttccctctagatctgcttatcagccatgttcaaataccattgtttcagtctattactccaagaaaatggcatctcgtccagccagagaacccacctcttttcataggccctaggtcctgagtggctctttggagtagctgtatcttggatcttgatgctccaagagtgaaactgtttctttcaactatggagttcagatcttgagccaaaaatctttcagcggctggtacaaaaaaaatccgctgtaaaaccatttacaatggtaccagccagaaatgtgataacctgtgtacattcagatttctgggttacctgaatggaactcttacacttattacctagcacaaggcttggacaaacacaagtaccttacattctctgcatgaaagaatgagtagaagtaggattctggagggaatccaacctgacccaaatgtactttttactggaaaacaaaagcatttgaggaattgctgtgtctgtggatgatttacctgccaaaaatgaacggcagagtggctaatttagttttatttcccatgtgacctgcaggtaaatgaagaaggcagtgaagcagctgcaagtaccgctgttgtgattgctggccgttcgctaaaccccaacagggtgactttcaaggccaacaggcctttcctggtttttataagagaagttcctctgaacactattatcttcatgggcagagtagccaacccttgtgttaagtaaaatgttcttattctttgcacctcttcctatttttggtttgtgaacagaagtaaaaataaatacaaactacttccatctcacattataaatggactctgcatttgaaatgaagacaaggaaaggggaaacatgctattggggcacatggtaaaatgatgccttcaagttgttctttacccagtaaccacatctggatcaagaaaatgagggagagagcgataaaagatggtagacagccagaaagggaagggagagtgaattctcagtatttccatcacactaaaacatatcaaaaatttaaacagattagtttctatatacagaaaagacagattcaaatctgagtattaaaccatttaattctcaaaccactcacatgcataatgttcttttacacagtgttaaaataaaggggaaaatgcatttttatacaaacagaatttcaagtatacattaatagacttttcagattactaaccaagttgctaagatttcattcacattgttcttaaagctgttcaacgagaaagcttttgctaaactgctttaaatatgtttatataaacccatattttcactctttctttgaactccctcccccaacccgagtctctgcccaccctcctgccctccccccttccccgacacgacaggggtcctggggctctaggagacatgcaaccccaccaagaactattggcttgtcatcaggggaaggacagaatcttacaggaggagagactgagaacacctgtcaaatgaagggagaacaaatctgatacttagaaatgacacaaatcaggatcgtgtcttagagtctttgtgttttcacttgatttttaatttaaaaaatctcagcctcccacaaaacaccaccaaagtttctgacaaattggtagctgtgaaaataatcttaggtagtttttccccagtgaaacttccaaaatcaggacaggtatttagaaccctttttcaatttggcggttctttttccctttggcatggagtgggggccacttaaaagtggatgttattacttgtgtgtttacattaagaaatttggttcatttcacagggtctggtaagagctctccctccttaactctcctcctgaagtaatctggtttcagggccaggaacagccactctccttaggaattaaagtgcattttttttcggtaaagggaaagagggggaggtggaggtttacacttaagtgataatgattaaagtagggttgggtgagagaaaatcctactcctatatataggtatttataattaaggtcataataaaaactgatattcttaggaaataagatgcacaaagccagtctagcaccctcagtggtgcaagagcactattctggttcactgactttcccgaggcatctttactattaatggagtaactgcttcagatgaaaagacacaaatctcaaacattagtttttttcaaagggaaaaaacagactggtaggttcttacagctaaaaatactctattccattccctttcagggataacattttagaaactgattgtctgttttaatatgaatcctccttgattagcaagttgtaaaaaatattagataaatttgttgtttacaaatattatggtagcctttagaaacttaggaagaggtgggcatagttgatccttgctatcaatcaatatcaactgagaggaagtgaaattttcctttatttgatcgctaccatcagaatcttattttctgactagtttaaatgctttacaatttcttcttgggttaaaaacccaagagtttcccatagagaagtaaatgctacattaacagctatacaaagatgtgatgggctcaagatgagaagggggatcttgtcctggattctggcctctgagtccagtgtgatctgcttttcacagtgaccagtgtgaaggcacagtgccagggacaggtagatggggacagctgtcacccatcatataagcaccatagagaacagctggatagatttctttcagactatgtccatctgaaggaaatcaaatttctgctacattgacttttctgtctttgaaccctcagccttttctcctcctttcagaggcagagcagagcgggtcccattcagaaattatgaggagcctggaaacctaaatgttcttccaatgtactcatttagaaagaaatgccaaaaacagagttctaggccaagcacagtggctcacacctgtaactttaggagtcctaggtgggaggatcgcttgagcccaggagtttgagaccagcctgggcaacatagtgagactctgtctctaaaagaaaatagaaaatttagctgggcgtggtggcacatgcctgtagttccagctacttgggaggctgaggcaggaggatagagtccaggaggtggaggctgcagtgagctataattgcaccactgtactccagcctgggtgacagatcaagaccctgtctcaaaaaaaaaaaaaaaaaaaaaagttctaactttaagatttcttaaagggaaggaagccattagttcctgatgttctgctatcagattacaaaataatgcaatgtgctaaaactgtgaacagagatcatagcagatgaaaaattaatggactgagaacacatttcttttgcctatagtttgggaatgcttttctttcgttgagagtagggggatggagcagggtggtgaaatagtagtactcaaactaacgtttgttttgctgtcttagaaaggatttcctagaggtttaagaggaatcagcaagccaacccattaggcagaacttgaccaaacttcacagtgctgacagggaattcctgttagggaatttgtttcattccttgcttaaaatatagtacaagtttacgtatttatcttttatcattacttccccactctgctctactctctccccataaaatcttaaaatccagtgcagtataatttgcataaagttcaacaatgtttcacagtactccacaaggttcttcagtatgaaaaccctaagggggctactctctttggagtctcaaaggctattgcttttctactccaccagtaacaggaagccttcagcaaattttctaaggcataggaggcattttcttggacactgcagcatttacatgctaagcaaacagccaggccttagtgctactttaatgaaatttcacagactgatgctaagtcagtcctctgcactaaccaactttctccttgacctactttttctccttgcacatatcacctactgaagttcaaattaccacgtacttgtaagcaatatataaatgaaactttccgtggtatccagaatactctcagaagagagcctgctacatttgaacttgctcttaaatacaaattttcttcatgagttagaagtcacttggtagctagttagtttgaacagtggttctcactattttagggtaataaaacagttctcccctctgtgttgaggttgccatgggcaagaaacaaacccattaaaacacgtttactacctgggatgagaaaaatgaatctggaacctcatttgggagttacttggttaggtctttgacatcccagaagaaagatcctaaaatgactcatttcacatttcatatattattcagaaatacttaagccttaactagttcatttcattcacaaaaaaacaatccaagaaaagtgaaagttaactgacactgaaatcccacttagaagacaggctaagagataaataatcaaacatattaccatcaccacaggcaggatccttccttttctccattaacaatgccacctgtttattttacaaatagaaattgctgtaagcagtttgggctcttttaatatattcaagtgctccatttcagctagttgagaaatctccactgaaactacatatgcaaaagaaagaggattctagagaaggaactttgaaaatttgttttgcttatttatgtgtactttgtatttggtatagagaggaaactggatggatgacaatatctccctccagaattattctgaggacaaatggatgatccattttactacctaagccttgacccactgtacactttgaattgagagccatgcatggaatatcaataaagatattttcaggtcaaagaggactggattgaggttatcctgccatgaccactagggattacatagggagtgattctcaaccttggctgcacattagaatcacctaaagcccaggttgcacaacagaccaataaaatgtaaatgtctagagggggtcctatgcaattctaatgtgcaaccaatatgaagaactgggtcaactagtcctgtaatagaaagcataaggccggtgttcatccaagctagagagagaaaaggtaagactccatggcttctgtccagatttatggatttaacatgctgcaatcaaactacctaggcattttttcactactttttaaataaataactggctgtaataggcagcaacagcaacagtaaagtactgatttaggtaagaaggctgcaccttaagtatgtgttatagcaaaagatcaggggacaggcctaggacaaaactctgggcacaaacaaaagataagccagaaggaaaaattttcctaagcaggaattaattcctgggtctaggatattagcatggcttataggcagagaactatgctacaggtagaaaaaaaaaaatagtcgtggtaaaaagattcatataatttaattttaccacttcatctccctacaagattcttactgcatttgggcagaaattactgtatcagttgttatttgtgagtaatgcttgtcttattatttggaatttcacattctctgcatctccacttgccgtatccaaagtcaccaggaaactaaatacttatcagctagttcctaaaatacgggagccaatctctaaaaatctgaaaatgggtcactctctcatttcacttctaaccagagaatccctgtttagacatttagacaatataatcagtgtattagggtaaaaagcatttccacaagtagaaagcattctaggatatcaaaggaccaacagttcctccttagctgtaagaaatattagaaaagtggacaagttgacttggctcagtgcactagtgccccaaacagaaaataaattgagtgctacaactggatttaaagattaggtggtctgcctggtggcatattactattgaaacaactttctgacacctacaacattcaggtgaggacatcatgactattatgacaatattgaccttaaaaacaagaatatctctctttggagagattagaagtaaaagaggtcatctgaaaatccatcatgggccaggtgtggtgactggcacctgtaatcctatcactttggggaggctgaggtggtaggatcgcttgagcccagactttttttttttttttttgagatggagtctcgctcttgttgctcaggctggagtgcaaccgtgtgatctcggctcactgcaatttccacctcccgagttcaagcgattctcctgcctcagcctcccgagtagctgggattacagatgccgccaccacacccagctaattttttgtatttttagtagagacggggtttcacaatgttggccaggctggtctcgaactcctgacatcaggtgatccgcctacctcagcttcccaaagtgctgggattacaggtgtgagccactgcatccaaccaaacctagatgtttaagacgagactgggcaacatagggagactccatctctacccctgccccccaaaaaaaaagaagttggggattcaaacaaatgttacacatcattaaaaggaattaggtgttttagtctttaaaaacagacttgacctccactggctactcctgccaaacagaagccagtggataaaagcagtaaaccgggagaagtctgtaggagacagagagagaaaaaaaagcactaaactcaagtgttctgacattgtttgatttgggcaacaaaattaaatattgatatctgaacatgataagaatttcagatactgcagcctctctattttgggtctggctttcctttgcttgctacagaaagctatactctttcttcagccaagtgctcagaggtagaggagctgaagtgagtatagagaagaatggggtagacagtggctgaggaatccagcttcctgcccaagggactacagagcaatcttgaatatgctcagtctctagtgggaggtaggatattctacactgacttttatgccttcacgaaatacctttttctcacatacacacataaacttacacatacatagctggcaactcacagcaatattgcaattcacagcaacagtatacctatcccaacagccactttcaacctaagttttatattaatccccaaccctactcaggtagatggcaagccaaatttatttttttgaggtccctccttttgccaggtttgaaaacatacatttcacttttacacctacatcttttttctctaaagaaaagctgcattaagtgggtgcattgtgttataacatctttacaaatagaaagtgcaagaaataattttcttagccaaaataccaagtaacaaaaagctctcatagcctactatgccaagaatttgatttttagaattaatgatacagctaacaaaatgcttctgtgctaccaaggtcacagtagatgactaaatatatttataaacatacatgaaaaaatagccaaacttcccataagttatttgcatgaactatctttagtatacccactctgggttcaatgcacatgcatatacaatggaattatattagtgttatttttattgtgccagttttccaaaaagaaaacagactttttaaaaaaaattcgagttacatgatttaaaattatttttgtaaaaatattagaaatgccatatacattctaaatatttctgctatctaacagatagccattctagagacggacttcagtcacactattagtgaccccttttttagcatcttggcttccagaggaaacacattttaagctttgttccctgcactgcaattctgttttttcagtggttcttaaagaaccactatagttaggattctattactttataggaaactcagtggatcatcttcaaatatgtcataaacatctgcttcaagatgtgactaaaagcagaaatctaaaccttaaggaatttctactcactcaggttgttgtattagcttgaaatggtttagatttgtgatgctgaaaataaagaataaatatttggtcaatctacaaggttcccctttttctggctttgttctctcttgcaatttaagaccacatttaagaattatttaaatgaatagtaagaattatttttcatgcaaacaccaaatgatttcaaacttaaattcacagagaatctataggagggcccaaagggctgtaatagagaatgagagacatttccatagatcatcattaagatttttcattccctgggacaatattttcaaaggctttctctgtcataaagggcagactacaccagagtggattataccagagtggaaatgtgaatccaaaagaaagttttaaggcctttaaatttttattcattaaaatttgtcccttaacatgttaagaatgaactggaaaaaaaaataatttgccctaatctttatatgataaaatctaattaatctttatgcctaaaagcctcaaacattccatctctggttatgcaaatacaaatgccaaggtcttctttttcccttcccaggactttgtaggtacccaaaattaagtcttcagcattgagtacccctttatttcctgtatttgtaattgctaaggcctgacctaggaacagagatctctttactgtgataactgcagattatcagtaggaaggccacacagctaatgctccaaggattcattgcacatggactggataatctcaaacctttcttaagaagtgtattgatttggggttcatcaatatggacaatgaaattcattctctgtccatatttcttctcagagcaggaacagtctagtaagacagcacgagtttaaataaggcatcctaaatctgacacatctaaccaaaaatcaaaaaacttcaatgatctgttattttaaatgagagaggctggtaacaactgccaattttaaaagattaacaacatataaaattgggcgatgaattttcctgtatgaaaggtaacaagaatgaaaggaattgattcatcttcgagcacaaaatcatgctggaggtgtagaggtagaatgggattaagataagtaggtaaaacttttcactatctcaagaatatgatccatgtagccacccaatagaaactcctgttgaaagagattcagcagccatgcaatgtttccataccacaagagtattcacctatttgtaaacttaaaatacaactgatatctccaagaaatcaaattatttaatagtaagctttccaggccaggcacgttggctcatgcctgtaatcccagcacttcaggaggccgaggaaggtggatctcttgagtccaggagttcaagaccagcccaggcaacatggtgagatcccgtctctaaaaatacacaaaaattagccaggtgtagtggcacacgtctggagtcccagctacttgggaggatgaggtaggaggattgcttgagtccaggaggttgaggctgcagtgagctgtgattgcaccactgcactccagcctgggtgacagagtgaaactctgtcctaaaacaaaaaacaaacaaaaaaaatgtaagctttttactccctctagagtatttctagctccgcatgcagttaccgtggcttcagagcaaaaccaggcaaatgttcacaacttggaacacagtacaaaatgaaaattttgctataagataaatgaaacttggagggagagggcagcaaatgaagtatgctccagatatttgtctcattctccttctagctcctttagtgacccatggtagacataataaatggtttctacagcacaaacaactgatgaataaacaccaaagagtcaagacaaaaaacaaaacaaaacaaaaaaaacattaacacattaaaaatagccccaagtcctggacatgccttccataaagtggtagggtatttcttctctccttaaatttgggctgaccattgagttcttttttcccccttcattcttgctgtcatcttaccattaagttcttcgaccaagagtacagtggtggctgtatgataattctaggcctggcctttaagttgactagattcttctgcccagcctttcagaggccttagctgtcctcgtagtaaatctgactaccttgatgaagagaacacatggagagtccttagacttcatggagagaaagaggagacctgctgagtccatccttctagtctccccaccaaagtgtcaggtatgtaagatcgatcatcttggacactccttccagacttgtctaaccacctgctgaataccaccaggtgacctgagtcgttgtcacagggaggagaattgcccagacaagcccttcctggattttctgattcacaaaaccatgatataggaaatggttgattttaagtaattaaaattacttaattttaattaagtttgttacacagcaataggtaactggaactctttcaatttttgccttgatagtacctcactcactattagacctaaccacacgggtgactcccttgaatcagtgggcaatatccactgaaaatattcactattcaactctgctcagagatcaactgcatcagcttttgaagaaccttctaatcacttactcttgaattacacattcacaaaaagcagtactgttcctggctactgtatattccagtcaacttcaactcttgataagtaaatggagtcaatatgacatcatgcagatagtctgggctttggaatcaagattggtaaatattggctctgtaatttaccagttatgtaaccttgggttcatcagtttcctcatctataaaatatgatataattacacctactagaggcaactctagtgttagcctgagtcagttgtgtctgtttcttcccatctaaaatgaggatgttatctaccctcatgggattgtcataaggattagatgagttaatcaatgtgaagcacatagaactgtgcctggcacatagtaagcattcaaaaaaagttagttatttttaacattactgttattacctcatagtattattgtcttaaccacagttatgacgataaagcacttaataaagctaattctgtcccctttttgatcttttatctctacagtaaaaagtgcaggcttttcaaaagcaatacatcccagacgccaaccaagtgggcttaggactctcaagtataggaagacacatcatgtctaaactatgtctaaaaccagttttattatacaaatcccaagcatgttgtctggtatcaaaaagtacttaatatttacttaatgaaacattctcttatacattacctatcactgcagacaggtgatttcatagaagaggaaacatgttcccatgaaataccttaactcctggcattatggattaactgaaatcctaagattcacagtatattaaaatcatggtgtaggccatatgagatgctgaatataaaactctcttaaatggggctgggtgcagtggttcatgcctctaagtccagcactttgggaggccgaagcaggaggatcaattgaggccaggagttcacgaccagcctggccaacatggtgaaaccccatctctactaaaaatacaaaaattagctgggcatggtggcacacgcctgtaatctcagctatttgggaggctgaggcacaagaattgcttgaaccaaggaggtggagattgcagtgagccaagattgagccactgcactccagcctggaagacagaccaagactctgtcttaaacaaaacaaaacaacccctttcttaaccggatggtgtattctagcctcctcaacaggacctattgagtagacatgaaagacgcaggcaatagacaagtttttttcattaactgctttgcttttgtaatttatttccttgtttgaagtttccagtatttgagctaatgggcttcttctatgttaagatgtgagctactgatatattgataatggtaaaaatgtcaggtaagaaaatttatatacgtaccctctataaagataatgggggtttcaagtaatatttgccttctcaagtcactgctgtgtcacagttgaggagaaagacagcctgcctacacagcaaaactgaataatctgcaccaatatcttccaggttttgatactactatcaataattacatactttggaatgtaacatattcagatgtttcaaagtattcataatatctaactctggcttatcctgaacaaaaaagcctgcttgcttagaaagtagaaagactggccctgggaaaagcaccatttaagaggaagaagactaaagacagggaaagagactagaaaatacgaaaaaagataagactgaaaattatcaaggaagtcataatgcttggaaaactccattgctttcaatagatgcatatttaaattgacatctattaccaagacctcaaatagagtgggatgcagatgattcactgggctaacaaaatccaatttctttcacaagtcccaccttccaggttaatcagaatcctaggttaatcagaaaagtaatactccaaaatctcaaaaacctactgttactataggtataactgctctaagccaggggagatctaacctaggcaaatattctggaactttatagatgaggattatctattactcagagggtatatcatataaaacttcctaatatccaattagaaagcagcaactttaaaatacctagtgaagagagtccctattatagaaagctagttactcacttgaactttgtctatgttgacagcgctcacaacagattcaaactccctatactgtatcagcatggcctagaaaactttgtcaagatagatctaattcaaaagtccctatatcatttccaaatgggaagcaattattctctcttcttgcaaggatttttttttgttttagagataaggtctatgttgcccaggctggtccttaaattcctggcctcaagtgggcctctcagctcagtctcccaagtagctgggattataggtgtctgctgtcacacccggcttcctgcaaggatttctgtttatgaaccccctaacatttcccatttttcccacatcgagtataagtaggctatctgaacactaagaatgaacattcacaaagcaaacatgttaatggtccaatatgtatttagaagaattatagacaataacagaaatgggaagataggtctaaaaagaatttgaaatcctcagatgtttcattatgtttcaaaacatccaggaaaaaaggaagaaaaacttggctttttactgctctacatggaacagagtaagtttaaagaagttaaaattaagatacattgcaaagggaaaaggtaggggttctaatccagaaaaacagtactttggatatgaatcaaaatacttcttcataatgaaattagtttttaatccacttgggaaaaaattcattcttgtcaccattatgcaaaccagttcaagttaactcagaggaatggcaaaacttacttacaactaaactttaaaataccggcaccattaagacaaggacaaacaacaggccaattctaaatgcttttaaagtaatgggaatcatgaaggagcacaaaaaaatcatgaaggagcacaaaaagagttatgataagaggatctagaaaaagttggcaaactctttcaagaaaacatgtatatgtgacaacatgaatttaaaacttcaaccaaactattataaaggcaaaatgtcatgagtaacaactttaggaggtaattctttcttggagttggcaaattttttctaacaagtaccagacagtaaatattttcaagctttgtagccacgtgatctttgtcacaagtactcaactttgccattgtagtagaaagaaggcataaacaatacctaaacaagtaagtgtggccctattccattataattttctttacacaagcaagtagcctcagcatttggcctggaaactactgtttgctgaaccctgatctaattccgtaagtcctaagggtatattttgctgaggacatcttctcaaacctagggatttgcccgacaattgcttgttgcttttctaaatctgcttagcaaccaaagtatttcaatattttaaactctttcacatataacctaaataaagagctcaatttccaaagactaagttcaattaagactcatttgttattccttgaactaataagtacacagataaggggaaggacattttaggaagagaaaaaaatcatgcctcttgtacctgaaaaaaagaaaaacttccaggattccaactcttcctgattaaatgcctttcactatgatgaagaagacttttgtctttgttcagtttcctttccattatccattgctttcatttaagttagacagtctggtcaaacaaaataaatacagttttcaccagttaaaagaaacccaattaatgtcaagtaacagctaaaactctggaaaagttacttcttgaccaaagattattcagctattaagaatgacatttacagccaggtgtggtcacacgcctgtagtcccagctcctcaggaggctgaggaaggaggaccacttgagcccaggagtttgagaccagcctgggcaacatagtgagaccctgcctttaagaaaaaaaagaaaaaaatgaagttccctacttcactctgccaccagaccaattccaaccaataccagatgtcaactatgaagtcggggggaaaaagttttttctatcttcaaaccatctttggaaaaccctgtttcactgatgtagagggaactggaaacatttaaaaaatgacaaaaaataaaattttccttaactgctctcttcattcccaaactttatcctctatgaactaatttacctttatgtatttgagattagatttaaccctctattataataaaaatggcatggggtagtttgcaacttggataaaataaaattcaacttggttcagaggtaaatacggttctgagtaaagagagaacaagtcattagaaggagcctttctgcctaagtacagcattaactgttcatgccaatgctatattttatactggtattagagttcagacagaataaaggaacatcttagtatgaaaatagattaatatacttccgtctctcttctttgctgagaatactggatagctcctttgctactaagtgccactcaataaatgaaaacagtcccagtgtttgcaatttcatggcattaaagtacttcatgatgatgtagctctcattgctaatgcagttcccttcacaaggtaacacgtgcaagttaagatttggtaattaattttcagcatcaaccaaacaaagtccatttagtacatccttaagaggtatcctctgtgcatacaccaatagctgttcattaatgtagatagaacatcagtaactcctatgaccaatgtgttgttagctaagaactaggacaatgtcacagtgtatgtgggtaagagtcttggacagttatttagaataacaacatctcttttaacgaaaaagctgaaattgttttcagaagttttaatttgtttaaaagctagcctgccttaaattttcatgaattttgtggctctggctaggccaattgagagaaccagcaaacatgattgtgctaaagtggtcctagatgaccaggaagcaccctattcacagtatcaatataggaaaaggctatttaaagtgaatgaaaagaaaagggaggggaaacccaccaaacattcatagcatttccacatgaatgagatagtccctacctcatttgtttgttgctaaccctggaaggagaattgacaaatgctgcaaagtttctctttacagaaattactgcacttcacctttaaaatttggtaatagtttaaaaagctccattttctcacatataatctaagaaactaacaaagcaacaaagaattctttctccaggccaagttcactggctcatgcctgtaatcctagcacttcgggaggtcaaggtggtaggattacttgaggccaggagttcaagaccaacctaggcaaattttgtagagacaccgtctctacaaaaaaatttaaaaattagctagacatggtggtgcatgcctatagtcctagctacctggaggctgaggcaggtcaatcacttgagcctaggagttcaagattacagtgagctatgattgcaccactgcactctggtttgggtgacaagaggaagacacagtctctaaaaaatataaaaaagaagaaaaagaaaaacagaactttctagcatactatttctcaaaagtaggatggacttaaaagttttttggtaggcttaaaggctccatccaaagcagcataatctgtacttctcacctcactgcctatttagtaatgacaaaatctgtccactgaaaaccttattaccagttgtttccctaaggatttttggctaattcaactttaccttttctatgccacagagcacagccagtccctaaagatggctttagaagacagttttttccttatcatgctgttgtctaactaaagcggaggatgcaccagtctatgtcttctaaagacaaaatacagtttcaatgctgcctttaagggtaggctcttattaaatggtagcatcattatcttcccataaaagatgcatttctatgctttttcagaagataaaataacctttctcttgtgagagggtgcagctttatgtacatgtacaattctcagattgcttaagatctaccctttgcattctaatttcttatctcaaagagatttctttcttttctacccaccttttcacataccacaaagcaatctcaggaaaggagcacatgactaacattctcacagatggttcaccagtgcaggtacaacctgtccctctgccaaatctcttttacagtcatctatgcctctgcactgaaacaatttcttaaaccattacatacttaaaagaaccccaacaactagtgctccgtcaacagaagctagagatttttcaacttgcactgtaagttataagcatctatttgccggcatcccttaatattcctccttctctcacttcatgaaagacggggtatccaaagctctacatgtttgctaagttctttctctcagtgctggattaagaatcttagaaatacccagaattactaaaagggtcccttgaagttttaaaaatcttaggaatgactaagtaaccaaacctgaccaaaattgatcctttgatcatttattgcaacatgattctgcatgatgttttctgataagtgccctgtagtatattattaaaaagcaaagctcttggagtcaccagctatggtttgctgatggttggtttatgaattactaggtttgcagacccgagacatagttttaagtgaggtccttctatatgcctgaaaatataaactattacatatgtataaggaaatgaaattgtggttgcagtaagaaccatagtgttgaatttcttcaaccacaatactgcagaaaaaacatgtttaaaacttcatataaaagttatcaaatatggagacctgtggatttaaaaatacaatccaggctcatttcactggaaagtgacatttttgattacaatattgctgaacgtgaaaataggagccaaagagactagatgaaactttggtagtcagcctaacacattaattcacctgaactagagccattacccaaggatgtgtagcactatggtttacaaataccagtcaggaagttgcagaacggctctgtgctgtttgatatttgcaaaacataaaaacacttccctccctgctctcctcttcctcaacacaacactcaagccccccaaatgtagcagtacctattgcatacactttgctgctcatttcactcccagttgccaagtgcttcaggtgatgttgtccactagaatactgcttcaagatggctgattatatgaaataaccaggcaaagtattagatgcctagtcaggggaaagataaagcctaacctttcaaaataagaaccaccagtattcatttttttcttgaaacacaaaaatgcatgttatgccagggaaggaagaggagaaatttctcctcctcatcaccatcatgactacctcctctcttgcggttggctgcttcggatggttgaggctcctgctgcattttttagatccgggcaattatagccaccaagatgatatggaccaaagtacagtgttcaaacatgactgatagataaatgaccatttatcatcatcgttttgttaaaaaaccttttttcttataaagttaacaaaccaaggctgttgatccctgaattagaaagttgatttgcttgattattttccaaagtgtgaggcgggcaataagaagggaggagcctttagtgcttttgtgtaagttgctgatcctccagtttggcaacatcttgggagcatcttctggcctagtgatgtggcattttgtgaatctaagtatcagcccatggctctgatgctggctgcttatggctcataggggaagagggtcagccccctccccctggatgtttcagtctggcccagtggtggacacagagccctggacagcttccccaggagcaactgtctcttcctgtgaaggtgactcttcctcagcttgtcctcgagatgtgacagttgtttcaggggagatgctgtgaggcccctccaggggtatacagccagggtggtttttgcgaaagtgctgattcaagatggcctggaaggggaaacttttgccacagacatgacagtgaaagggcttgttgcctgtgtgcttgcggatatgatactccagctgatctttccgggtatacttcttgccacacatgcggcagacgaatggtgtgatccccatgtgtaggcgcatgtggcggtccaggcttcccttctggttgaaagatttggcgcaatagatgcaggtgagacgagggttgtaccggaaccaccgctcagatacttcctgctctcggagatactccacatagccacttactcccatcattgctgactcttctacctgtaccaggtaaggaaaataaccaagaaagaacaaatattattaagcatacatattaaaagcaatcaaatctatttttacttgttactaagatatatgtacctttttagtggcggatcaaacagaaaattattaccaaaaagtaaagatattaccataataatttttaaaaaattgagactactctattccattactataaaagaacaacacagtaaagttactttctggctgacaaactggatgcttattaaacccctgctgaatgtactattttacagtaatgtgaggagaaactgagcccacttatactataccctggatcctaatcttacaattatattctagacaatcaaatacttaggcagtgctggtctaacagaactatctgtttttgtttttgttttgagacagggtctctcactcaggctggagtgcagtggtgtgatcacggctcactacagcctagacctcctcaggatcagatgatcctcccacctcagcctcctgagtagctgggaccaccagcacgcaccaccactcccagataatttttgtactttttgcagagacgaggctttgccatgttgcccaggctggttctgaattcctggactttggcaatctacccacctcgatctcccaaagtgccaggattacacgtgtaagccacgacgcccagccagaactatcaatgatgatgaaaatgctctaccccattcattacagtagccactagccacctgttgctattgagtatttgtaatatggctaatacaactgagtaatttttacaattttaagtgctttcagttaattacaatttaaatttaaatagccacatgtgacaagtggctaatggctaccatttactatatcagatagtatagaatatataatggcaacatattataaattgtgacattatcattaataccacattttaatctagcagtagctagctttataaaaatgtatacaatttgtaggtgacaatattcctttttatgtaaaatatttcagtatcatatgaacatattattttcactctaaagactactaaagtttaactgacttcagagtaaattgtctgagggcatgggtttcttttatccgaaaactgggaggcagtatgaacatattcctttcaataaattacttaaaaatcttggatttaaggccagatgtggtggcttatgcctataatcccagcactttgggaggctgaggtgggagaataacttgagcctaggagtttgagaccagcctgggcaatatagcaagaccccacctgtacaaaaaataacaataaaaaattagctgggtgtggaggtgcgcacatgtagtcccagctccttgggaaggctgaggtgtgaggatcatttgagcctgggaagccaaggctgcaataagctgtcatcaggccactgcactccaggctgggtgacaaagcaagaccccacctcaaaaaaaaaaaaaaaatctttggatttagaaatgctttttgttcaaaattctgtattaaaaaaatcaatcagaaattatttttttaacctgagttaataatgactgacttctgaagtcattatattagaggaataaaaacctttttaaatatgtaggagggaattatatgtttaacaaagaataaagtaccaatgcaaagagaagaaaatgtcaaagttgactctggagtaactggagcaagattcatctagttagcaattaatattgtgccggtactttttcccctaagatagacactatagaagatcttgtgcccttttaatttctaaaaatgtgttttgtcccttcctatgctgatggtgctattcagcctttccaatagaggcagttctcaacaggtttgggaagcagtatgtaaagtcaagggttgaatactaagactgaggttttaagattattttatttgtttcatattaatatttctttctgcttcatttccctggataaaaaaaactgagttcacataaagaatgaggaatcatcccactaaaggtcttgggtgaccagggacaaaacagaataacttctctaaggctgtcttctcatccataaggtacaaaggttatcacatgatttgccagctttagaggattctcacgagaattgaacatgataacagtacacttttcttttttttgagacggagtttcgctctttttgcccaggctggagtgcaatctcggctcatcacaacctccgcctcccgggttcaagcaattctcctgcctcagcctcctgagtagccggaattacagaacgcaccaccatgcctggctaattttttgtattttcagtagagatggcgtttctctgtgttggtcaggctgatctcgaactcccgacctcaggtgatctgcccgccttggcctcccaaagtgctgggattacaggcttgagccaccaggcccagccaacagtactcttttttctaaatacaatggtaacttttaggaccttcaatggtcccaaaatattatgcgatgaatgcataatattacatagcaattaaagatgctggaacctgtgttcaaatctgagttctatttattgtgtgacttggagcaggttagttaacacttctattcctcagtttcctcacctgtaaagtgaatatagtaatagcatttgcctcactagttgctttgagcattgaatgagttaatacactaaagtactgaataaatgttagctattattaaacattacaaattcatattatttataatcttgagggtaacaataccctaagaaatctccctaactctgaaaggatttcctatttaataaatggtgctgggaaaactggctagccttatgtagaaagctgaaactggatcccttccttacaccttatacaaaaattaattcaagatggattaaagacttaaatgttagacctaaaaccataaaaaccctagaagaaaacctaggcaataccattcagggcatgggcatgggcaaggacatcatgactaaaacaccaaaagcaatggcaacaaaagccaaaatagacaaacgggatctaattaaactaaagagcttctgcacagcaaaagaaactaccatcagggctgggcacagtggctcatgcctgtaatcctagcactttgggaggccgaggtgggcgaatcatgaggtcagcagatcgagaccatcctggctaatatggtgaaaccctgtctctactaaaaatacaaaaattagctgggcgtggtggcgggtgcctgtagtcccagctactcgggaggctgaggcaagagaatggcgtgaacctgggaggcagagcttgcagtgagcagagattgcgccactgcactccagcctggacgacagagccagactctgtctcaaaaaaaaaaaaaaaaaaaaaagaaactaccatcagagtgaataggcaacctatagaatgggagaaaatttttacaatctacccatccgacaaagggctaatatccagaatttacaaagaacttaaacaaatttacaagaaaaaatcaaacaaccccagcaaaaagtgggcaaaggatatgaatagatacttctctttttttttttgagacagagtcttcctctgtcacccaggctggagtgcggtggtgtgatgtcagctcactgcaagctctgcctcccgggttcacgccattctcctgccttagcctcctgagtagctgggactacaggcgcttgccaccacacccggctaatattttgtgtttttagtagagacagggtttcaccgtgttagccaggatggtcttgatctcctgaccttgtgatccgcccgcctcggcctcccaaagtgctgggattgcaggtgtgagccaccacgcccggccgaacagacacttctcaaaagaagacatttatgaagccaacagacacatgaaaaaatgctcaccatcactggccatcagagaaatgcaaatcaaaaccacaatgagataccatctcacaccagttagaatggcgatcattgaaaagtcaggaaacaacaggtgctggagaggatgtggagaaataggaacacttttgcactgttggtgggactgtaaactagttcaaccattgtggaagacagtgtggcaattcctcaaggatccagaactagaaataccatttgactcagcaatcccattactgggtatatacccaaaggattataaatcatgctgctataaagacacatgcacacgttatgtttattgcgacactgttcacaatagcaaagacttggaaccaatccaaatgtccacaatgatagactggattaagaaaatgtggcacatatacaccatggaatactatgcagccataaaaaaggatgagttcatgtcctttgtagggacatggatgaaggtggaaaccatcattctgagcaaactatcacaaggacggaaaaccaaacacctcatgttctcactcataggtgggaattgaacaatgagaacacttggacacagggtggggaacatcacacactggggcctgtcgtggggtgggaggaggggggagggatagcattaggagatatacctaatgtaaatgacaagttaacgggtgcagcacaccaacatggcacatgtatacatatgtaacaaacctgcacgttgtgcacatgtaccctagaacttaaagcataattaaaaaaaaaaaagagaaaaaaagaaatctccccaactctaaggaaggtaatatcataccagtattatccacatgcagaaagtaaatgcattttagtaatcagtgataaactgtgagcacaaacatcacacattatgatcagtctcatccaaaaaattactgcagtgaagttgcaatagaagaacaaacaccacaaaatgcagattgggtccttgtcaatggcagcaatatactttttgtagttttattgttttaaacttaaaaagaagcaaaggcaaaaacggctagcctcatggttctctctgttgtcaagaggtggattatttcattcctctcacttgacaattacctattagactgtaaactctgttgtaagcacagggacattctgcactgccaaatatctaggaatttgatcagtgcttggttcaatagctatttcttaatgaattactccatataatttatatgaaaactccatataaatgaaaggtttccatattttctaaaacaaacatcagtctagattcttgacatggacttcaaagccttctaccattctaattttcagttactaaccgcagacccaaagttaactgaagggccttaaaaagtcatctggtttggtgtattaatgtttttgaaagatctccaaaattaaggattttacaagtaactaaataactccctatttagtaggtgcctatttattgggcaactactaagtaaacttagttacttagaattacttagagataaaacaacaactattaatcaggcactaagaagataatgtcagagatacaaagaagataagaaaacgtggtctctcaaatgcaataaaatgcacttgggtagtgtgtgcctgatcctgtgttcctgtttcccctaaatgctttcccccacaccccattagttattgtatttgtctgggctttgtaggacttcagagttggtgattgctaggtggcctagtttgtgtaaatataatgtgctggtctttctccatgttcttttttgagacagtctcgctttgtcgcccaggctggagtgcagtagcatcatctcggctcactgcaacctctgcctcccaggttcaagtgattctcctgttgcagcctcccgagtagctgagattacaggtgcccaccaccatgcctggctaatgttttatatttagtagagatggggtttcaccatgttggccaggctggtcttgaactcatgacctcaggtgatccacatacctgggcctcccaaagtgctgggattacaagtgtgagccacctcgcccagccgatagttgcaaactacttctccgtgttcttttggggtttacaaacttctttttgtattgagagaaaaatagccaaaacatctttgacagaaggttctgtacctggcaaaaaatctgaaacattagactgcggagccctcttcttaaaagtggggatcttgaaccatcctttctttagttttctcctttccctattacctattgggccagatcttctgtcctaaaaatttgtctcctacccttctccctcttttccatcgacccccaaaagaaaacctacacacccacgcatatacatatttaatttttagggcaactacacaactctgaaatgattgatgcaaaaatcctgaagaagctaggaaacccccatcccttgtttccaatctcctgagtcaagaccatttttcttgatgtgattcatgctaaacccttaagacactgctggattctggatggattaaacctacctcatctttaatcctaaagtagagagaagcaactgggggctttccatgtagaaagtggggtcaggaagccaagaaagagaataaatgctgattttttttttttttttttgagatggagttttgctcttgttccccgggctggagggcaatggcatggtctcggctcactgcaacctccacctcccgggttcaaacgattctcctgtctcagcctcccaagtatctgggattacaggcacccgccaccatgcctggctaatgtttttgtatttttattagagaaggggtttcaccatgttagccaggcttgtcttgaacctcactcctgatgtcaagtgatccgcccatctcagcctcccaaagtgctgggattataggcatgagccactgcgcccagcctaaatgttgaatttatatccaagtcactcaagaacttttatacaggtgtaagaaatttatgtcaaagtagccacaagattgcttaacaggagatgaacaaatgtaacttaatgtttaccactagaagctaaagctttatgtgaaatcttgaatttatgaggtggaagggagggtaggaaagtctgtacctatctgttcttttcctggtctcttccccttattcctgaactgcaggagacagagcctctttgggcattggtgaccccatcactggggtgtgtttatttgatggttgattgtgctgtactgggtacttccttgcccattttctaatcattctgtaacataggctgactctttccccttccttcccttctcctttccctgggaaaatagaatgcataaacaaagacttattggtactaaaactgtcaaaagacaaaaacaaaaagaggaaagaaaatgtggtctctgctctcaaggagatttcagtttaacaggagacacaaaactaatgcaaataaaaaaggaacaacatatattgagtctagagaattaggaaaaattgtattgtaccatgctataatagtagcctaaaaaggaaaaatcaaagaggactggagcagttaggacagataaaactaggagctggaccttggctgaacccagacacctgaaaagaaatgaggcattcagactttagatgcagaaagagaaatagtttaatgtggttctgacacagggagagtctatctgtttgagacagtgaatgctgatgagtggtgggaaaagttgggttaaaaagactgtaaatcacttgaaaaattaggccaagtatattaaccttcatgtcatagaaaaagctacagaatgttttcaagtaaaagagtaactttattagtgtgttccagtttaatcacccccataatcaggaagttcttcaaatctatcaatattcattcttactgtaagtccttgccctgttttagttctctgtagtagaggaaaaaaactggtgagtagacttaccatattaaactttcatatccattaaggcatatatattaccctatccttgaggctgtatgtggtggctcacatctgtagtctcaccccttgggagaccaaggtgggaggactgcaccttggtcttccaagtgatgggattacaggcgtgagccactactgagctcaggaattcgagatcagcctgggcaacacagtgaaaccctgtgtctacaaaaaacaaaaaaattaaccgggtgtggtggcacatgccagtggtcccagctactcaggagctgaggtgaggggactgcttgagccagggaaggcaaggctgcagtgagacatgatcataccactgcactctagcctggacgacaaagtgagatcctgtctcggaaaaaaaaaaaaaaaaaaaaaaaagaaagaaaatcttgacaacactttccttaagtggacactgatttcattattccattgccttttaaacaatcctagtcccacaacactattactcaagtttatactgtagagtcttacagtttttttgtgtgtatttgttagtctgtcttatgcccccattaagttgtaacgtctgactcattactgaatttacagttatgtaccacataacattttggtcagtgatggaccacatatgtaaccgtgcttccatacgattataatacaatatttttacactatcgtttctatgtttagatacacaaatatttactatattcagtaatttatgtttagatacacaaatatttactttgtaactgcctacagtattcagtacagtaacatgctatacaggtttgcagcctaggaggaacgggatatatcatatgaactaggtgtgcagtaggttataccatctaaatttgtgtaaatatactctatatttgcacaatgacaaaatggtctagcatttctcagaatatactgtcaattagtgacacacgcctatatctgctcaacagcctcctctgcattgctatcataccatatttgagagatgaggagaaaaagggccctaataatatgagccaaattacctttcctccaagctcctaatattttctctaacatcttatcaaaactaaaaaacacagtttgtaacaatgtcttacggctattactataccatgcacacaataaatattcagtggtttaggctgggtacggtggctcatgtctgtaatcccagcacttcgggaggctgaggcggttggattacctgaggtcaggagtttgagaccagcctgaccaatatggtgaaaccctgtctctactaaaaatacaaaaattagctgggcgtggtagcatgcacctgtagtcccagctactcgggaagctgagacaggagaattgctcgaaccagagaggtggaggttgcagtgagccaaggctgcgccactgcactccagcctggatgacagagccagactccatctaaaaaaaaaagtaataataattcagtggtttagttaaaaattagacaagatactatcagtgtaatgcagaggctagaaacatgagctatgtaatcttaattcaacagtgtttactttttaaaggcaaaaatgttcacaatttattgtcttctacttggtgagttcatgagctttaaaaaaaatcattcaatcagacctgtgagaaaaaaaaaatgagcaaactcatactagttgctaaggagagttgcaaagaaaatagaaaaaaacccatcattcctatcctttctagaatgtgttagtctaacaaaatattcaggaagaaaataaatgacaagatacagtacatgaaatagcaaacacacataaaaatgtgtaagcagctgggcacagtggctcacgcctgtaatcccagcaaattgggaggctgaggcaggcagattgcttgagtccaagagtttgagaccagcctgggcaaactggtgcaacgccatttccactaaaaacacacaaaaaaatcagctgggcatggtagtgcgcatctgtggttccagctactcaggaggctgaggggagagaatcacctgaacctaggaggttgaggctaaagtgagttgagatcgcaccagtgcaatgcaacctggtcaaccagagtgagaccctgtctcagaaaaaaaaaagcataagcaatttgtttacaaatatataatgcaggccgggcgcggtggctcacatctgcaatcccagcactttcggaggctgaggtgggtggatcacctgagttcaggagttcaagaccagcctggcccacatggtgaaaccctgctatctactaaaaatacaaaaattagctaggtgtgctggcgggcgcctgtaatcccagctactcaggaggttgaggcaggagaaccgtttgaacccaggaggcagagattgcagcgagccgagatcacaccactgcactccagcctgggtgacagagcaagactgcctcaaaaaaaaaaaaaaatatatatatatatgcacacatatatatataaataaaatgctacaaattagtaacttcataactgtgtgtgtgtgtatactacgcatagtatatatagtatatatagtgtgtgcatactatagtatacatagtgtgtgtatactacatatagtatatacagtacacacgtgcacacacacacacacacacacacacacacacacacacacacacataataatcagactttcgattccaggtcctaaattacctgcaaattacctgtatgtggttttctgggattattttttattactatcaggtctacagtgtggttattataatcaggaaagagttccacaatcttacttttttatatttcccaaactctgctgacatcgaaagtgtattttcctgcacgcccacaagcaagaattttaaaaaaaaagtaatcaaatacagtatttaactttgcattttttacataacaagtcaggctgtctactaataacaaaagttctatttcttgctttgtcatccttatgctataaatttgtatttcttgctttattgcattgactaggactacaaataaaaagctgggtagaagtggtggtagcagacattctgtctcattcccaatcacacgaaggaagctttcaataatttactattaagatgttttctgggctgggtgcagtggctgggtgcagtggctcacacctgtaatcccagcattttgggaggccgaggcaggcggatcatgaggtcaggagatcgaaaccaccctggctaacacggtgaaaccccgtctctactcaaaaatacaaataattagccgggcgtggtggcaggtgcctgtagtcccagctacttgggaggctgaggcaggagaatggcgtgaacccgggaggtggagcttgcagtgagccgagattgcaccactgcactccatgcactccagcctgggcgacagggtgagactcgagactccgtctcaaaaaaaaaaaaaagatgttttctatagattttttagatagatactttcaatcagattaagaaagttcccttgtatttcttttttttttttttttttgagacggagtttcactcttgtggcccaggctggagtgcaatggtgtgatctcggctcacagcaacctccgcctcccgggttcaagccattgtcctgcctcagcctctggagtagttgggatcacgggcacgtgccaccatgcctgggtaattttgtatttttagtagagacgggttttctccatgttggtcaagctggtctcgaactccggacctcaggtgatccacctgcctcggcctcccaaagtgctgggattacaggcgcgagccactgcgcccggccagttcccttgtatttctagtttgctaagagttttagccaattgttcttttctgtatttatcaaaattgccacatgtaatttatcactttttccttattaatgaaacagattacaatgattaattttaaaatgttaaaccagctatcagtgttaatttgttaatgttcttttcaaaatatttgcatctatgcttggtagaaataccagtctgcaattttcctttctggtgatgtctctgtataattttaatattaaacttctgctaccctcagggaaaaaaaatacagtatttctttaacagggccattgttacctctcctacatcttttctttttcattattttctattcatacacagtagcaattcctccaaccaccaaagcagttctaaatccacaactccatacctgggagctgggttgcttaggctcatccattctcccaggagactcacttctggctctgtgtctctctgtcaagggaacaacactgccggaggggctaaatctgttggaagaggaacataaaggggactaatacaaaagcagcatcaaagaacctgaaaaatggtgatgtcgcccctctttattctatggctgaggaagggggaacaaaccaagcaacaaataactgaggaatagttttgtggagttaatacataatctgatttgaaataataggttagccctagtaaatttaataaacacaaaatgacataacagatagaacatatgagctggtgaagctaaagctaaatataagctttcttccttatataaatactgggagaccataaaagaataaattaaaacggggcctataattttgtttcttctacgtaattaccaggtttttggctgtttcttccccaaggtcccataataatctgtattttagactattgatatagatcatggagattaaaaaatctttgcattgaaattgatattactttttttttttttttgagacagagtcttgctctgttgcccaggctggagtacagtggcgtgatcccagctaactgcaacctccacttcctgggttcaagcgattctcctgcctcagctggcccagtagctgagactacaggtgcgtgccaccacgctcagctaatttttgtatttttagtagagatgggattcaccatgttggccaggctggtctcaaagtcctggcctcaagtgatccacctgcctcagcctcccaaagtgctgggatcacaggtgtgagccaccacacctggccctgatattacttctgatagttttttttaaaattttatttccataagttatcatggaacaggtggtatctggttacataagtaagttctttggtgatttgtgagattttggtgcacccatcacccgagaacttctgatacagttctaacataggaggacaagttctatgctcaagattattttaataaggacacaggaagacaatactcaaatcaagatcacctgaagccaggcacagtggcaggagaaacgcctgaacccaagaggtagaggctgcagtgagccaagattgcaccactgcactctaacctgggcaacagagtgagacttcatctcaaaaataaaataaaataaggccgggcgcagtggctcacacctgtaatcccagcactctgggaggctgaggcaggtgggtcacgaggtcaggagatcgagaccatcctggctagcatggtaaaaccccatctctactaaaaacacacacacaaaaattagctgagcatgggggcagggacctgtagtcccagctactcgggaggctgaggcagaagaatggtgtgaacctgggaggcagagcttgcagtgagccgagatcgcaccactgcactccagcctggacgacacagcgagactccgtctcaaataaaataaataaaataaaataaaaagaccacctgaagtggatacagtatacactaactgaatctctgtgatacatttgtttctcaagaccaaagtaatagttttttagttttctttgctcatatagtcaatttaaatttatttttaagagggaaaaagaacaaatattaccaatctaaattagtaatatttctttcaattgagactttctctcaattgactgaaacccatggtatttccaccaaaaagaaatgtctaataaatacaatgtattaaaagagaaaagtgaggcatggggcatagcagcactggtgaaaaaaagggagattgtcaggcctgtggtagcagcagtcatccatgaaagaaaacagggaagataccatcacgtgacaagggaaaaaagagatgaaaaatatccataacgcttttcttcagaattactattttactaatttgaaaagaacaattactgctggtaccatacttcctctaatttggtagttgggggcaaagaaaagcaagcagtgctacaaaggaaagtgagactcctggaggccacctacctgtgtgataacacaccaaggaagggcaatgctgctaggttcccagctgatgatcggctccctgcctcgaatcccgaggaagccctggcaattactgatcctatcctagtgtggctgcagatgctattctgattcacggaagtgtctaactttaccacagttctcacaacattgtgaatacttcaggaatggagcttcctggtttaaaaaaataagaatgcaagtcttttggcacacctccagtttccccatcatcaacttattttgaccaagaaaatcaggtaaggaaaatgctctctgtactacagaggacactttagtgatgtctacacaatagccattacatgggaaaaccaaaccaaaccaaacctacctgtcaacttcactgcttgttggccgagccaccttggctcctgaagaccctaaagtataattttcctgtcctacagaaccatggcctgtggtatcaatcaccatggctgttacttcctctgcactactcccatcttctccagaaggctgattctcaggcccaagccactcctccagattttcagttttgatgtgtactgctccaagaactctaacttcatcatcactccgacccccacggtccgccactcctgtctccacataccactgtcctgctcggttgatccgaagaatgggctcccggctctctacatcagaacttggttcaatgatctgagggctggtggactcctcaggaggacttagctctctgatatccagcacagcactaacctgacctcgccggtttccctttggggtattatgtcgtgggctaagggagcggttgagatttggtgtaaccctgtgagactctggaggtctctcttgatgctttgtccttgtttgacttaattctgcttcaacctcagccacattaattttgaaatgaatgccctccaggatctgtgtacatttgtctataatatgctgcatttgcagaaaactggcagctgttaggtagctgatgatatctgccagttgcaggcatatccgccctgtgtaacagaaagaaaggagctgttcaaaaacagtagggttcttgatgactgaaatggagactgtactcatctcattcaaggacatgtgatcccggaaatagggggagctggcagccagcaccactttgtgagcccgaaaagcttgtccttgcacattgaccacaatatcacagagacggccctgcatgcgcaactggtttagatggctcaggacagagttgctgaagtcaggaatctccaattgtatgttcccacctttctccatggtcgtgcctgagggtgcattcaaccctgctgaaaaaagaaaccatattctcattaataattataattttacttcccggatggtttccatttcaaaagtatttaaacatagttatctggtaaagtttcaaaatctccagataaaagaaataccttccttatatttagatgtggaaacagaatcaccaacaggtttttcagtttaagtttcacaggaggacatagttaaaactaaaaagtgatctttagactcctaaaaattcatgttatgaccatgctttccttactaataagttatataacatcaaaacagaagttcaacagaaggtagggggaaggacttttaagtgttaactataaggtacttgcagactgaatataacatctcataactttacaacttttctctggaggaggaaagctttctgaataaatgcaattctacatagcttgatatccctcttcttagtattttactacctgctgcaagaattatgtttattattttataaaaggactaatatcccacatgaatgtaggctaatatttctaagcttaagaatcagagccccccccacaaaaagactttggttatagggctgtgaagcaaactctaggaaaaatcccacagctgtgccaggattcaaccaagatgcagagaatgtgaagttcagttgtcaaaattaggaaagctgggtaaatctgccaaattcgaagttggcaattccgaggtggtgatgaatacttccatcctgaaacttagttctccagatccgatgaaaaaatacagcatttaccaagtatgccaacatttttccattaaaatatttttaaaaaatggctgaaacactaaacctgaagctgtatacaagatagttgaaagtacagtttcaactactgaaaatagtttgtataaatccgaacaggaagacatttacttaagcccaatgtgcgttcacttatctatatattacatagttacaccacacctgaaacttcaggaacttactctgccaagctcacagtactgccccgcattaacaacacacttattaaatagggaagtgtatacactgttttcaacaatcaactttagccaatctgacctttttccaaagcgttattgtttgttttgaaacttttaatccaataagagcctctgtcgatgccatcatgaattcagatgtgtttattttggagcctacaccagcgccttttttgtttgctctttccggcaattccccagtgaggaagcccctggaggaaagtctttcgctaccgtcggcactggaggggtgagagctgtaaaagggagaattgggaacggcatggggttggccactccagcacttgagcagctttcttctgcgttaggaagcctggggagaggggaactggctaaagggcaaaatgtcactgaggaacttcggagaagatggggacaaggcgtcgggcgggggagccagcgctcaggtgagaactaggaagggggcggcgcccagggaccggctccaggcggcggcgggcggggagctgccaggaggtgggtgtgcgtatctgggtgtgtcccggctgcggtgggggagggggccgcccttcccggggtcctgagggaggggccccgcgagggggcgggtccggcagatcagcccggccgggggccaagggggtggaaggtcgcccggtgcctggaggcggggtgaaggaaagtagctgagcgccccaggagcgcgctgcggcggagggcgggcgaggtgaccccggtgcagggaagtggcactggggtgtggggcccgagtccagtcaaggagcagcacctacctccgggggtggaaatgggccggaatgggccggaacaccgtcccggaagtgaaatcccccaccccctcccacggagcgggcgacgtgccggaaggaaatcactcagccttacaccgcccccccttcccccatccccagagctttccttgcctcgcgccccctcccctctctgctcttcctcctcagtcgggaggagggcgggagcacggcatcacgtggacggtcatgtctctgcccacaatggcgaggaagggcggggaaaaggggcggacttaaggggtgggaagaaggtgatactggatgagaggaagattgagggaggttagggggaggagccgaagcggacgctgccgggagcgtgcgtcgtgacgtcatcaaaagaactcttatatacaggagcccaggcaccatactgtcttttcgaggtaggagtcgactcctgtgaggtatgttttatctttgcgaatgttgcgggttttggggcgctccagcctttgtctgctaaggtcaccctgaattgactgggacttctaagccagtcgcgcgcctttgcagggcctacaagttgaggatggtgggggattgcacatatggtgcatgcgtgacctaagctgcgactatgttagagtagaactgcggagaagcctcggctctcgtgccctgcctctgatgaagcctgtgttggtagggacatctgagagtaatgatgaatgccaaccgctctgatggtggcacatgccgagtcacccgagtaagctattgttaagggccgtgacccgagcctccatcagccgtccgctctcatgaaaggctgtcggtggtagtccacgtgcttaagtgcctgcattccgcagtgtcaccaatatttccattagtgtttcttttttcttttttgagaccgagcctcgttctgtcacccaggctggaatgcagtggctcgacatcggttaatggcaacctccgcgtcccgagttaagcagttctgcctcagcctcccaagtaactgggactacaggcgcgcgccaccatgctaggcttttatatttttagtagagacggggtttcaccatgttggcgagactggtcttgaactcctgacctcaggtgatccaccagccgtggtcccccaacatactgggattacaagccgtgagccaccgcgcccggccgccatcggtggttcttaactgcgggtgcagtgcttctttgtaacattaagtgtatcctttacctgtcgctagataatgaatggtatgttacctgcatcattggtttaaaaagacgaaccgtttttttaaagaacactctttaaaaaaaagaaccgtggaacaatgaattaaaatctgtacctgatctctttaggtatggtgctgggtgcagatgcagtgtggctctggatagcaccttatggacaggtaagaattggggaaagtatggtgggaagaatgaaatctaagaggtggtctcagcctgtgatgctttaagagtagtggacagaagggatttctgaaattctattctgaggctttaatgttaacagcatttatatttaacgtgactgctgtgaggttcattctcactgttttgcttgcatctttttgttttctagttgtgtccccaaggaaggatgagaatagctactgaagtaagttgaaaattccctctcaaaaaggtttaaagccattggatgtgccacaatgatgacagtttatttgctactcttgagtgctagaatgatgaggatcttaaccaccattatcttaactgaggcacccaaaatggtgagttggggaacatagagagtacacctaagttcacatgaagttgtttcttcccaggtcctaaagagcaagcctaactcaagccattggcacacaggtgagacacctctattttgtacttctcacttttaagggattagaaaatagccaaagcaatgatgattatctatgttagtgcttctctcccctcttttcaaatgagaattttgctctcatattgatactaagtttaatactgaagaaaatgtgaaaacagatactatgatggttgcatagttcagcagatttaatcatgaagagatgtactatctgtctgatgtatctggggtagttgtggtttgctgttaatggttaagcagtgtaccaccaatctaccattaaaatattttttgctgacaattttgtattaaaattacaggcattagacagaaagctggaagttgaaatggtaagtgaaactgtatccaagtaagcaggtaactgggcaaacttcctacggcacaaatggctttttagttacctcctagtgctgaatgcattaaataaatggcggattcttgtcttgttatgattaataagaaagtttgtaaatgcagcctggatgatgataagcaaatgctgactgaacatgaaggtcttaattagctctaactgactaaaggcatttgttagttttggcagggggtgaacactcatctgtggctattctaagaccactcttatttcttaggtggagtccaacttgcctggaccagcttaatggttctggtaagtattaatgaaaacagtagatagacttaatgaaaatgctgatggtgatatgcttactgctgagctaatggcttaaggcttggctgatgaatactgactgtattttccttgagcatgtctggaacagtgtttatgtgttttccttgagcatgtttggaacggggtttgtgtaatgatgttgatcaaatgtctgacctgaaatgagcatgtagacaaaggtaacactgaagaaccctgtgacagacaactttgaaaagagtttaatgatgtttagcattttaatggaagtcctcatttgtattccagctcctggtaacgtttttatccatggatgacttgcttgggtaaggacatgaagacagttcctgtcataccttttaaaggtacatgttttattgatgttaacgttaattgattgagctactgttagtgatgattttaaaattaaagcagatgggaatctctctgagaaagaaaatggagattaatcttaaactgaaacagtagttgggaaatcttttagaaatccacctattactacctattggtaaaggagattaaatttctacaggtatggagagtcggcttgactacactgtgtggagcaagttttaaagaagcaaaggtatagcagttccaagtattttttttttttttttagacaagagtctagctcttgcccagaatggagtgcagcggcactatcagttcactgcaacctctgcctcccaggttcaaggaattctcctgcctcagcctcttgagtagctgggattacaggcatgtgacaccatgcctggctaattttgtacagctatgttgtccaggctggtctcgaactcttgacctcaagtgatactgcccgcactgacctcccaaagtgctgggattacaggcgtgagccaccatgccccgcctcaagtctggtttttaagtgttgtaaagccgatacaatgatgataacatagttcagcagactaacgctgatgagcaatattaagtctttcgctcctatctgatgtatctggcggtaacattctagtttatgccccgaaaaggggaatatagccattctataatgtttggagattttggattactcctaattgtatgcaagttgtcttactgtgtattgtcccttaatttcaggactcagaattcatgattgaagaaatgcaggttagtttaaactttgaaggaaatttttaaggtggcaaaaggttttggtggcatatacaccttaatctgtagatgggagtgattagctgtttaaaagttaaaatgtgactgagaaggaaattgagtagggcaaattttaaatgggtattatttttcatcttcaaacaggcagacctgttatcctaaactaggtgagtcagcttttggtacatgtgatgattttcagtgtaaccaatgatgtaatgattctgccaaatgaaatataatgatatcactgtaaaaccgttccattttgattctgaggttactctactaacaagcatcacacatttgtattttgccctgattaatatgttggcttcgctttcagggtttttaatgaccacaacaagcaagcatgcagcttactgcttgaaaggtgaggattggaaatgttgggactattataattgcagaatacatgatgatctcaatccaacttgaactctctcactgattacttgatgacaataaaatatctgatattctgcattcccatgtagcattttaattgaagtctgtaaatgtggctaaaagtcttgtcttattttttgagacagggtcttgcctcacccaagctagagtgcagtggcctttgaagcttactacagcctcaaacttctgggctcaagtgatcctcagcctcccagtggtctttgtagactgcctgatggagtctcatggcacaagaagattaaaacagtgtctccaattttaataaatttttgcaatccatctggagtgtgtagtgtttacttaaaaaaggacagtgcttttcatctgttcattagctgtaagcataaatcacattcaaaagctattataactccatggtatttgcttcattaacactgcagccagttaaaattttatgggtattttacaaggtgtcttatgcattaaagtgcaatatttcctaattctccatatgagcaaattgtcaggtttcataggcccctgtgctaattggttttgagcttaaagtattgatggagctacttggagaaagtcatgttgagtctgaggctgggaaaataagttatagaaaatactatagaaatgcccaactagtgataggcattaatggaattgggaaaatctacaatccatagccatggtgataggtttttggcaagcactaagtgtttagggatgccaaaagtgggtataaagggcacaactggtttaaggcaatctgtcccagggaaacaggaccaaggggccaaaattccaagatgggtcaaattttaatttcagtgtcagtacagctgtgcttataatgatgtctttgttagcagtaatggttttacaaatctgtttctgggctaaagcactttagtcccattaatgataaaacttcagttactctctgaattttcctttttttgagactgaatcctgttgcccaggctggagtgcaatggcatgatctcaaccgctgctcactgcaacctctacctcccgggttcaagcgattctcttcagcctcttgtagctaggactataggcacctaccatcacaaccaactcattttggtatttttagtagagacgaaaccccatcctcccaaagtgctgggatttcacaggcctgagccgcagtgcccggcctcccaggccttttatgcttgatgtttttttcagggcccttcccattgtcatttcacaatctcattgaaatgtcagcttatgcactaaatgcgtgtaagttgggaatgcccaattttgtctaagaaaaaaggcctccccctcccccaaataagcacattctttcatttcctggggctcacccgaatgtctcacacaggctgtaaaacaactaccaccacctggctgggtgctgaggtgggcagattacctgaggtcaggatttcaagaccaacctggccaatatggtgaaaccccatctctactaaaaatacaaaaatctagccgggtgtagtggtgggctattgtagtcccagctattcgggaggctgaggcaggggaactgaacctgggaggctgaggttgcagtgacccgtgatcctgccactgcactccagcctgggtgccagggtgagactttctcaaaggaaaaaagaaggctgggcgtggtggttcatgcctgtaatcccaccactttgggaggccgaggcgggtggatcacacggtcaggagtttgagaccagcctgaccaacatagtgaaacccccatctctactaaaaatacaaaagttagccaggtgtggcgtgcacctgtaatcccagctactcaggaggctgaggcaggagaattgcttgaacctaggaagtggaggttgcagtgaactgagatcatgccaccgcactccagcctgggcaacggcgagacttggtctcaaaaaaaaacacacacacaaaactaccaccacctaccccaatcggttaccctttacttttcatgtgaccaccatgacctattatgtgttttgttcttacttcccccacaagaatgtaagcgcttcaagtttattccttaatgttggaaaaatgaatgaaactgcaaatgtagtagatcagtttttggggaggtaccaaagacaagttggtaaaataccttgattttgaagtgaaaaacgatgttacatttcaaagtatcttttcgccaggttatggctcaggcttcgagaccagcctggccaacatggcaaaacccggtctctactgaaaaaaagcgaaaattagccgggtgtggtagtgtgggcctgtagtcccagctactctgaaccctggaggtggaggttgcagtgaaccaagatcgtgccacctcactccagcctgggcctcctaggctcaagtgattgttgtgcctcaactacctgagtagctgggatgacaggtgtgtgccaccactcccagctaatttttttttctgtatttttagtagagatggagtttcaccatgtcagccaggctagtcttgaactcctggcctcaagtgatccaactgccctgccctcccaaagtgctgggattacaggtgtgagccactgcatccagccaagttctattctttttttttttttttttgagacggagtttcgctcgtgttgcccaggctggaatgtagcggcgcaatcttggctcactgcaacctccacctcccaggttcaagcgattctcctgcctcagccttccaagtagctgggattacaggcgtgggccaccatgcctggctatttttgtatttttagtagagagggggtttcaccacgttggccaggctggtctcgaactcctgacctcgtgatctgcccacctagcctcccaaagtgctgggattacaggcgtgagccaccgcatccagcttcttgttctctcttttatatataagtgccatttgctgaatcagaaaactttttgacaagcatattaaaagatttcagttgtatgtagtagctcatgcctgtaatcccaacactttgggaaaccaaggtggggggattgcttgagtccaggagttcaagaccggcctgggcaacatagtgagaccctgtgtctacaattaaaaaaaaaaagaaaaaaaaagtgagccgggcatgatggtgcatgcctgtagtcccaaccactcatgagactgaggtgggacgatcgcttgagcccaggaggttgaggatgcagtgagctgtgtcacaccactggattccagcctgggtgacagggtgagatgttgtctcaaataaaatattaaaaattggatcaccttattcagcattctgttgtttagcagttttggaattttagttgttagtaaatcttgaccttgagtacacgttattttgatattctgtgtgacaaaatgggaagtatgcatgaagcacatctgccataaagtatggatgtctagatttttttttccctagaaaaagtagttacaattgtttgagatacaagctgaactagctgcttgttttcacagaacatttttagtttgaaaaaacctgacaaattgattattcatattttaggggtaattttggcagagatttgctcaaaaaagaacaagtcagcttggaaaaaactgatggcatttgttgccaatgataaaactcaagcttccaaatgaaacctaaaattttggaaggcttgtatacacttctgtgcccttatagcttcctcagacttagacttttgtaatgggattggtggtaatattaattaatggtattttgttttagatattgtatatcaaaatgtgtcaacatttggaagatttgcataactcagtgaaccaatattttccaaatgatcaatcactggactggtgttacaaatatcacacataggtaaaagttctatttaaatacaaggtacaccaatggactttagaaaagctcatcaatacgatttcagaatccacattgcaactagcctttaaggaactctactacttgtcatattttggtgtggtatcaaagagagtatccataattatcagacaaagctattaaaatactcctcccttttccaactttatatatgagtggggtcagattttcttcacagacttcaaccaaaacagcatataacaacagataggatacagaagcagatatcagaatctagtgtcttctattaagccagaaataaaaaatatttgcagaaatataaaacaatgttactcttctattttttttttgaaaataattatttttaaaataaaaacatggctgagtgtggtggctcacgcctttgtaatcccagaactttgggaggctgaggcaggcggatcacctgaggccaggagcttgagaccagcctggtcaacatggcaaaacctcgtctctactaaaaatacaaaaattaaccaggtgtggtggagggcacctgtggtcccaactactcaggaggctgaggcaggaaaactgcctgaacccgggaggtggaggatgaagtgagccaagatcgcaccattgcactccagcctgggcaacagagtgagactctgtctcaaaataaaataaaataaaaacatgctatttgtgttaacatgtaatgggttattttaaaatgaatttaacattttaaactaaatcattaaatcaattattaattaattaaataggaggctgaggcaggagaatcacttgaacccaggaggtggaggttgcagtgagccaagatggtgccactgcactctaacctgggcaaaagagcgagactctgtctcaaaaaaaaaaaaggtataaatcaaaagaatttcaaggcagaagtgaagactgagtagaagaaaacaatttcaaaatcactgatcaagaccttgttctcattttgtctttttttgaaatggagtcttgttctgttgccaggctggagtgcagtggtgtaacctcggctcactgcaatctccacctcctgggttcaagtgattctcctgcctcagcctcctgagtagctgggactacaggtatgtgccaccacacccagctaatttttgtatttttagtagagatggggtttcaccatgttggccaggatggtctcagtctcttgaccttgtgatctgtctgcctcagcctcccaaagtgctgggattataggcgtgagccactgtacccggcctcattttataattattagtttattaaaacttttatgtgtatgattagaacttaaaatcacaatgagttttggtgttcactttttcgcacatttgaggttaatctaaggttgattagaattttcaattacttataattgagagaaaatagtgttcagtgattaataatatctttgttgtctttttttttttgagatggagtcttgctctgtcacccaggctggagtgtaatggcaccatcttggctcactgcaacctccatctcccaggttcaagcaaacctcatgcctcagcctcccgagtggctgcgattacaggcatgcgccaccatgcctggctaatttttgtgtttttagtagagacggtttcactatgttggccaggctggtgttgaactcctgacctcaagtgatccacccacctcaatctcccaaagtgctgggattacaggtgtgagccaccactcccggccaataatatctttaaaactaaaaaaaaaaacagaaaattgataagtaaaatgacttttactattgatatcagttttgtttaatctgaaactataaaatagagatatatctacctatttatggatggataataccatcatctcatatttgtggaatgctttatagtttttcaaagtacttttattcactttatcttccatatatgttatctcctctgattccagcaataacagcccggtgaggtagccagggcaagtatgtattttacacattagcaggaagggaggctaagcgaggtttatgtaacttactcaggctgaaacactgaagaaaaatttgtgactctcatttcagtgatgttttctgcattattaaaaaatattatgctactcctcactatattatgttgatggttgaaatgtcattataaagcttaatttatatgattctcttgatgaggatgatgaagcaaatgctccatcaactcactagtttacaggggcaagcattttcctacatttcacacataatttgattacctctgtcctaagtgaataatctactatctgggtatgagaaacatgatttgaaaacactaaaccactatattatttcaacaaagaaccatctttcacacctaagtaaaaaggaacttcaaaaaaagtcctaaccaaaaaaaatccaaatgatgcatgaaatcaagtcaaaattgggtatcttttatctgtttcttcgttgtggtgaagaatgttgcctggattccttccatctaaagacttgattgttagacctgtggcagaactctagatctgactttagccttggggaagcaaagaggacaaaacctaaaagctcaactttctgcatggtatgcatgattcaatgagctctttctgctttggagtctgttggcttggagactcggatatgatagggcttcagttcctcaggagggacagaatctggggtattgctcatgaggtcatgtccccggaaggactttgggaaggctatgacatctctgatgcttggagatccagtgacaaggcatatcagtctgtctaaccctgtgagtaaaatacaaagataacagatgagaaatgtaatctaatgttggaaataacttagtttttctataaaagttgtagaaaacttttaaataagaatctttaacaaactgtagccaaccatcgttccctacctttttagagaacttttgtttgtttgagaggttcttttctatctcattctggaaaagtattcaggactaatgttcacatgctacttggattgtcacagcgattagtgttcctagtaaaggcttactaaaggccctaaaacagattcaacagtgtatttggtgcttggcagggaactccataaacacagaaggaagtccctgttgttggggcctacaatctaggtgagcttcctagaatttcttactcttccttgctttgacaaaacaagcaaagtgagtaaccatggcaatcagaaggacactggcatcttcctgttttcatacaagctgaacattatggagcagtgctttccagactccaatgagtgcgtatgtgaggccatggggatttgaacaatattgacttaagatctgcagttttaagctattaatgatctttcaaatgcaaattatcagttaagttatatctttataactgttaagatatatttaaaaaatatattactgaaatttcaacagaaacttacattctcatggaactcttggactcatccttccacctctaccaacacaaactgagaacctgaatttgagacagtgcaatggaattcagtttatcttataaaaggaaaagttgtttacctaaggcaattcctccatgagggggtgccccataatctaaagcctggagcagatgggagagcattttcacatcctcctgaaattcaaaagataattcagtttaaatatattttgaaggtccactaagtgccaccatctaggcttagatgataaaggggaaacaaagttgagttttaaaacagctaaaactgacttaaccaataataaaagtttattggaaaagtgtaaagaaaaaattaccttaagtgatttgcaggttagtaagggaaaaagacaagtcatagatgattataacatgtacaaaaatgcctggtgttcagtaaatgcagcttttactgtattcacaatgcaaacagagtgagaccaaatgaggaggtggggataaaaagcaggaaactctcctgtcacagagaccaagggaagagagcattactaagtgggcaacattgtcaaatgctgccgggaggaaggagaacttaagggccaagaacaggccactggatttagtgatcttgtgagtaacttttgtggggcagtacatgtagaaatgttgaaagtgtgtttggaaatggttctccaaccaggctacaaatcaggatcaagtgggaagcttcaaacaaacagaggccaaagccttatgcttagaactcttttattcagttggtctgatgtgtagccaaggcaccagtgttttttttaatgctttccaggtgatttgattgtaaggtgcagcagggctgagaaccactatttagggaagcaacagaagtaatgtattctaggccaggtgtggtggctcacacctgtaatcccagcactttgggaggccgatgcaggcagatcacctgagattgggggttcaagactagcctggccaacatggcaaaatgctgtatctactaaaaatacaaaaaaaaaaaaaaatgctgggcgtgatggtgtgtgcctgtggtcccagccactcgggaggctaaggcaggagaatcacttcaacctgggaggcggaggttgcagtgaaccaagatcacgccactgcactccagtctgggtgacaaagcgagaaaaagaaaaaagtaatgtattcttagtgactcttgaaaagtttgacaatgagaggaatgaaaaaggctgaaaactgctgactggaagctgggctgggcaggaggatcgcttgatcccaggagtttgaggctgccctaagttatgatcatgccattgcactctagcctgggtgacagagtgagactccatctttttaaaatcaaacaaacaaacaaacacacaaaacccaatgggtgattggaggctttgaattggcaggagaaaagttaacagatttcggctgggtgcggtggctcacgcctgtaatcccaggactttgggaggccaaggcgggtggatctcttgaggtcaggagttcgagaccagcccggccaacatggtgaaactctgtctctactaaaaatacaaaatagccgggtgtgttagtgcgcacgtgtaatcccagctactcaggaggctgaggcagaagaattgcttgaacccaggcggcggaggttgcagtgagccaagattgagccactgcactccagcctgggcgacagagcaagactctgtctcaaaaaaaaaaaaaaaagttaacagatttcacaatgcccttaaactttaaggactctgaaggcttaaagctaaaggagtcatctcatggtctgagttctccttccatcctacctcacacttgtcagttaatcccacaaaacgatcttttaggaccagactctctcagaccttttcctttctgaaacctacccaagccttctacagcatcaccaacaaacttcaaattcttaggtctgcacctgtacagactcttcttttacttttaaaaaatcctgattactccactatcactaaaatatatccctgccttaaatatagctaaagtagtatctaataagtgatataaaatcttttcaaacttctctctctttctctaacattatcaacatttttagtcacttcagactgcatggttttcatttgatttgatttttattttttcaagctgcatggtttttttaagcagggtagtggttaggagcatgggcttaagagccacctcacctggattcaaatcctgactctgcttacttttgtactgtcactttggcaagttaagtaagttgcctcagtaaatctcatctttagagtgggcagaataaggatatttatctgcactattataataagggtatttaatatgcactattaattagtatttaaatagtactgtttaatagtgctatgtgccagatactatttaagcatttaatattattatttacttttaatattattatttacttttccaagtcctacattaaaggtagagagatagctgatgctattttgtatcttgtgaatcctccaatcataacaaatgtttaataaaataggctgatttaagtcagatgcagtggttcatgcctataatcccagcactttgggaggccgaggcaggaggagtgcttgagggcaggagtttgagagcagtgtgagcaacatagggaaatcttatctcttcaaaaaaataaaaaaatttgccgggcatggtggcatgtgcctgtagtcacagctacttgggaggctgaggtgggaggatggcttaagcacaggagactgagattgcagtgagctatgaatgcaccagtagacacctgcctgggtgacagaatgtctcaaaaacaaaacaaacaagcaaacaacaacaacaacacaaaactgaaaaatattctggtaaaaaaataagcccaggatagcagatgatgtttgttacctttagtaaggttgccaggatataacgctgcagctctgcattgtgaattcgaattgaaccacctcctatttcattgccatttaaaaccaagtcatagtgttggctacgggcctagaagattcacagatactttatgttagagaaaatgtctggttttctgttctacgggttgaagaccctgtagatttttaaagacaatgtattactactaactcaaactccacaatttcttctggggcttccagaactgggtcctatctttcatcagaccttgaagtctgaagttctttgcctttatatacacatttccttttgatttggaagtatagatacggtacctttttgggctcagtgtacaggagatgtatgtcactggggtggggagcagtaaatgggtggtgggccgattccagctctctgggattttcctccttgggcaggaagagtgggaaatctaccacccaaaggaaagagaacagagtggggtcacggagcaccactcctcttgtttctagaaggtcagcacattccagtcgtaattttcctaacaaagagcactgcaaacagaagacgtaaacattgagttaacttcttgacagagcaggcaggaaatgacacagcctggattccgaagccaggccattctctaggaaaggattagccaattaacagataggatgccctttgcttctcaggacacaaagatctgaggataagtctaattgcaacaaggttgagaacaatcatcacactcaaccaactgggtgagtactgataactcggtgattaagaacacagggatcagcacttcatagacctgggtctgaatctcagtgtggctaattacgaacttctctgtaccctttttcattgtaaaattgggataaaaatatcaactccaaaagactgctgtgaagcttaagataatatacataaggtgcaggacctgacaaagtatgtgagtggtagtcgttctgattatttcctcacttctcttgaagggttgtggtgaggatttggtaagtgcctggcacactgttaatgttcagtgaaggctggctatcactataggtaatgcagattagaggtccatttaagagtgcggaggggtgcagtggctcacacctgtaatcccagcactttgggaggccgaggcgggcggatcacaaggtcaggggttctagatcagcctgaccaacatggtgaaaccccgtcactactaaaaatacaaaaattagccgggcgtggtggcatgcacttgtaatcctagctactcgggaggctgaggcaggaaaatcgcttgaacccgggaggaggcagaggttgcagtgagctgagatcacaccactgtactccagcctgggcaacagagtgagaccatctcaaaaaaaaataaaaaataaaaaaaaataagagtgtgaattttggaacccaacttcatgggttagaaatccggctcctccacttcctagctgtgtgactgtgagcaaaattttaagctctgtgactcacttttcttatttttaaaatagcaacagtatcagaacttctttcatagggttggcatgaggattaaatgagttaatgtatacaaagtgcttagaacgggcttggcaaatactaagtgcttaataagtgctacctatggtatgcaggacttccctgagaaaggacagctggttagaacagtgacatatgcctagagacatgatagggtattattttgcagcccattctatcttacatttacgtctacataacggaccttcattgtgacattttcagaatgttaatgttattcctcgaaagtctggtttctagctctctttcaaggaaggccttgtaggaatcagacctataacttcctgagaatgaaacaccagcatgtttagttcataccaagagaaggtttaatagccaaattagttaggaacaaaatcccatgttcttttttaagaaatgcattcataataaaatttggaaataaatagctttcttcattttactattgtaggggaaggggagacgggggattacatttagctttgaagctgaactctgaaactttttctgtggaagaaacaatgacaaatgaaaatatagattagaagaaagaacttgatgaagtactagttagacacactatcattttgaaaaaactatatactaaagtgaaaaaataaatttatatcatgcttgatctttacagtacatttttaatattcatatttgactttgtactatacttttctatattttacaaagatccctaaagctaattcagtcttccatatcccctgaagaatcatgactcagccagtgcatgatggcactcatcacctacagctgctgttcttgaggaaaaagggtcccactttgaccaagttggtccaggggtgtctgccagccctccagctcgccagtggtctgatccgtccctccacaatttacgaatgcatgatgtataaaaatttgagactcctaattttcttcatttgtgaaatcttgacactgaaaatattttttcatggttatatgactaatttcactaccccttaatctaagtggcttttctaattagggtcaggtctaatctatttaagtaatgccaatggaggctggtagctatgaaaaaaaacccttttttttttttttttgagacggagtctggctctgtcagccaggctggagtgcagtggcacaatctcggctcactgcaacctccccctcccaggttgaagtgattctcctgcctcagcctcccgaggaactgggactacaaaatacaaaaattagcccgccaccacacccagctaatttttgtatttttagtagagatgatgtttcaccacgttgaacaggctggtctcaaactcctgacctcaggcgatccacccacctcggcctcccaaagtgctgggattacaggcgttagccaccatgcccggccaacccttaagtttttatacagtgcattataaagcactataagatttatgcaggctgggcacggcggcacgcctgtaatcctagcacttcaggaggctgcggcgggtggactgcctaagctgaggagtttgagaccagtctgggcaacatggtgaaaccctgtctctactaaaatacaaaaattagtcgggtatggcagcgtgcgcctgtaatcccagctactcaggaggctgaggcaggagaatctctagaacccgggaggcggaggttgcagtgagccaagattgcaccactgcactccaacctgggcaacagagcaaaactccgtctcttaaaaaaaaaaaaaaaagatttatgcagagcagctccattttatgaattaacagtctacagttcaaacgtatactatatacataggagagtaaggcattgttcagcatcaacagcactgatgcttggaagtaatttttcttactgctttattgtgctctccagcagttagtaggaccacatcttcctcttgggtctccattagtctgattaattccagtctttgtgactccattatgaaattagcaactggagaattccagtttctattggcgttaaggaatacaggtaagatttcctgtgtaaaagaaaaagacttattcacgtttttttttttttttgaacagtgggattaatttatcttcttataatacaaagatttccggttcccaatagaagagaatttaaaagagattgtctctattatctccatgaacccattcaaaatgatactaagggaattttataaagtaggcttggcacggtggcttatacctgtaatcccagcactttgggaggctgaggtgggtggatcacctcaggagttcaacaccagcttggccaacatggtgaaaccccatctctactaaaaatacaaaaagtagctgtgccagttctgtgcacctgtaatcctagctactcaggaggctgaggcatgagaatcatttgagcctggaaggtagaggatgcagtgagctgagactgggccattgcactccagcctgggtgacagagtgagactcaaaaaaaaaaaaaaaaaaaagtcatttcaacataatgaaaaaaagggggaggggatgaagaatggagaataatatcagcagatgagagatttctgcgaatttttggcagactgcaagtgaactgagtaggaatgattaaagaagcaaggtgcaggaaggtctggcataaagaacaatggaggcagcctcagcacaagaaggaactgattttaccctgcagaattctggagaggctcaggactcttaagccttgagtgcctagagcagccttgctgctcatgctaaactaaacctaaccatttacaaagcctctctcttgagcttccaaccagctttttttttttttttttgagatggagtctcgctctgtcacccatgctggagtgcagtggcctgatcttggctcactgcagtctgcctctcgggttcaagcaattctcctgcctcagcctccctagtcgctgggattacagatgtgtgtcaacatgcctggctaatttttgtatttttagtagagacggggtttcactatgttggccaggctggtctcaaactcctgacttcaagcgatctgcccgccttggcctcccaaagtgctgggattacaggcgtgagtcactgcacccggccccaaccagcttttaaaatgcccctttcttgaatatgtacagataaccaacaatcactgtacattgaagaaactctgcagcattaaaaaaaaaaaaaagaccaagataaacccaaaaaattagccccagagaaaacataagttatggaccaaaagagaacttgaatcctcaaaggtactcaaaaatatattttatgaataaaaccagaataagatgcagtgaaaaaagctactgggaaataaaaaaaaattcaacagaagagttgaagaaatccccaggaaaatagaacaagacaaagaaaatggtgaaaaatgacatgcaaaagaaaagaggttaaattggtttgacatacaactagtagaaattccaaagagagactagaaaaaatgatgaggtcaaaatcattagataataaaataattttctacacataaaaagacataaaccttcgtattgaaagggctcttcaagtgtgtaacacattaaatgaaaaatgatcaaaaggcaaacaaactctgaaatttcagaacataaagaatcagaaggcaaaaagcttccaatgagaaaaaaccagctctgctataatggaataaattcacacaagcatcaaagcatcagacttctcatcagtaacaacagatgggagaagaaagtaaagcaatgccttaaatgttctaaagctgtgctgtctagcaatgcactgttgctatttacatttaaattaattaaaatgaaataaagtaaaaagttcagccctttagttgtactatcctatttcaagtgttcactagcgacattggctagcaacaactacaccgaacaatgcagacataaaacgtttccatcattacagaaagttttattggacagcactcttctaagatgatatggctgtcaattcaaaattttgtactaagccaaattattattgatcaagtgtgaggttttaaacataaagacattttgtaagaactcagtaagttgatctctcacatgctttcttaggaagttacttgattacatactccaacacaaaaaagaaagaggaaaacctgggatccaggatgggtggcttcaactcagaaaagaatgaagaaaagggccgggcacggtggctcacgcctgtaatcccaccactttgggaggccgaggtgggcggatcacgaggtcaggagatggagaccatcctggctaacacagcgaaaccccatctctagtaaaaatacaaaaaaattagccgggcgtggtcgcgggcgcctgtagtcccagctagtcaggaggctgaggcagaagaacggcgtgaacctgggaggcggagcttgcagtgagccgagatggcaccactgcactccagcctgggcgacagagtgagactcccgtctcaaaaaaaaaaaaaaaaaaaaaaaaaggttcagaaagacagctgtgcagaaggtacagagtaactaggtgaggtctgtatatgtgagcctcatctctcatgacaggaagttaacaaggtttaaatgaattaagtaaaaagaaaaaaaaagtatgtagagatatttccaaaaacagagatactctggcagaatactaggatggatggggcaggctagagcaaatgattattgcatttcatcattaatggttctttattttttgaaccatgtgtatgccatatgttgctaaaaacacataagatcttctgaaagcaattagaagccaaatcaagttaaaacactcataaaaaatagtagtagtaatacccatttcttatataaaagttcaggaaattaggaaagaaaaagaaaacaggagaagagagagaagaatgaaagaagaaaatgtaataatagtcccatcaactgaaagctgccaaagttaaccttcaggcttatttcctggtcctatggttcttagatgcagattttatatactaataaaataaaaataaacaaaattggaagataaagggttgccaatttttaattttataaagaaaagacatatttcatccccccgccatccccaccgccgacagagaaaaaaaggatagttctttaaatttgtttaactttatgaaaagcttgttatattgccctgacttttctgattttgtctcaacccattttgggaaccactaacctgatctttttttcttatataaaaatctacttattgttcgttgtgcttgaggtatgaggcttgggaaatagtggtagtagaggtaggtagtccattttcaatatacaaatatagtgtttttacatggttataatcagtataaatatagtcctatagcctccttttcttacatatcattataagagcatttttcctctattaagtcttagaaaacaagattttaaataggaactttaatattaattcctttgattatagcataatttaattactcctatatggtttcattttattcctgttatcatacctaagattctttcctttttttttgagacagggtctcactgtgtcacccaggctggagtgcggtggggtgaacacagctcactgcagcctcgatctcctgggctcaagtgatcctcccacctcagcctctcaagtagttgggatgacaggtgtgtgccaccatgcccagctaattttttttctgttttttgtagagacgaggtctcactatgttgcccaggctggtctcaaacttctgggctccagtgatactcccaccttgggctcccaaagtgctgggattacaggtatgcgcttccgtgcctggctggatcctttattttttttagagacagggtctcactctgtcacccaggcaagaatgcagtggcataatcatagctcactgcagccttgaactcctgggcttgtgattctcctgcctcagtctcccaagcagctgggactacagacatgtgccactatgcccagctaatatttatttatttagagactgagtcttgctctgtggcccaggcagtagtgcagtggcgtgatctcagctcactgcaacctccacctcctgtgttcaagcgattctcctgcatcagcctctcaaagtagctgggattacaagtgagcaccaacacacccggcacatttttgcatttttttttttttttgagacagagtcttgctctgtcgtccaggctggagtgcagtggcacaatctcggctcactgcaagctccgcctcctgcgttcacgccattctcctgcctcagcctccagagtagctgggactacaggcccgcgccaccacgcccagctaatttttttgtatttttagtagagacggggtttcaccatgttagccaggatggtctcaatctcctgacttcgtgatccgcctgtcttgccctcccaaagtgctgggattacaggcgtgagccaacgcgcccggccaattttttttatttttagtagagatggggtttcgccatattggccagattggtctcaaactcctgacctcaagtgatccgcctgccttggcctcctaaagtgctgggattacaggtgtgagccaccgtgcccagcccaattttttttcgagatggaatcttgctctgatgcctaggctggagtgcggtggtgcgatctcagctcactgtagcctcgacccccaggctcaggtgattctcccacctcagcctcctaagtagctgggactaggggtgcaactgggcagcatggtggcctgagcctgtagtcctagctacttgagagaaagaggcaggagcattgcttgagcctaagaaatcaaggcagcagtgagctgttatggcaacactgcactctagcctgggcgacagaataagactacatcttcaaaataaatatataaataaaataaaaagtaaataaaagcagaagaatgatctgaaataacaagatgctcaaaactaatgataatgatagtttagttaataatagttaaaaatattgaatctgtataaggaaaaaaactgctctaattaactccttacctgattaaaatggtcagctgcaaagtttctaatggattcaatgtctttcctttttaagtatttctgatgaaagaaaaatcaaagtaaacttgtcagtatgacacttagcttcataaacatggttatgcgatcaaatgacaaatatattttgtgtctttctattacaatagtaagatttaataaaaattcaatgtctgggctgggcgcggtggctcatgcctgtaatcccagcactttgggaggctgaggcgggtggactgcttgaaagttgggagttcaaaaccagcccgaccaacatggtgaaaccccgtctctactaaaaatacaaaaattagtctggtatggtggcaggtgcctgaaatcccagctactcgggaggttgaggcaggagaatcacatgaaaccaggaggcagaggctacagtgagccgagattgtgccactgtactccagcctgggtaacaaagtgagattctgtctcaaaaaaaaaaaaaaaaaaaaaaaaaaaaaaaaatccaatttctgctaccaaatgacacatttttaaagcttgttacagtgcttattttttccagttatgcagatttttttttttttttttttttttttttttttttttttttgcgatggagtctagctctgtcacccaggctggagtacagtggcgtgatctcagctcactaaaacctccacctcccaggttcaagtgattctcctgcttcagcctcccaagtagctgggattacaggtgcccaccaccacacctggctaatttttgtatttttagtagggatggggtttcaccatattggccaggctggtcttgaactcctgacctcatgtgattggccagcctcggcctcccaaagtgctgggattacaggtgtgagccaccacgctgggcatgcagctcttattggaaatagctgtgaatgtattccacaggagaccctctatatctaatatgcaggataaatgttcaacatgaatgtctacaactgaattgtgaaagaaaactttcagatcaataaaaggattcagaatttgattatttgaggtttcttaaaatctttcttttgaaattatctcagtgtctttcaagtgagacattatggttatcatgttacataactttgaaatgatccaaacacttaacatggtttgatgttttggggtgtattccccctcctttcgagagcatgatgttttatcagatcccctatgtgagaacttcgagtgaactccctcttccccccaggaatgttacctcaaaccttatcataactcccatgtgtgaattactgacctcaactactggacttcaaaaatacatataaacttaagagttcgacagacactttgatagcacatgctgtgactggctatactctgtcaactgcttctcctacagccaagagatgggtgataccctgttagtcttggagctaatctctgaagcctcacccacccacactggcactgccctctagcatcgagggaccttagatacagtgtgtactgtggtggtcaaaccagcttctcccaagaacagctcatataagagtacacctcaaactttaattagactttaccttccccagaggactacttccatcctaatagagcaagtggactttaataattttggaactcactcgctatgtgattaatgcacctcagctactgagtgttttccctgtgaggattgttcatgttattctttctttttttttgagagggagtctcactctgttgcccaggctggagtgcagtgaggcaatctcagatcacggcaacctccgcctccggggttcaagcgattcttctgcctcagcctcccgagtagctgggactacaggtgcgcacaaccacacctggctaattttttacatttttagtacagacgtggtttcaccatattggccaggctggtcttgaactcctgacctcgtgatccgcccgcctcagcctcccaaagtgctaggattacaggcatgagccaccacgcttggcccttattctctctctcttttaagcattgtgaacctaagaaaaaattttctttgtatggcaataaaccatgtgatttgtgaaatcatactttaaccatcttatttctcccatatgccacatatcattaactatattaatgtggcatttaactaggtacggaaggtataaaaagatgaaaacatgatccacactcctgcagttcttatatctacttgagaaagaacaaacttgaaatggtgtaaataatgataggcaaaatatcatactgagcttacctgaacatatttcttatgtctggactagagtatggacaataaattactttttttttttttttttttaagatggagtgttgctctgttgctcaggctggagtgcagtggtatgatctcatgctcactgcaacctctgcctactgggctcaagtgattctcctgcctcagtctcccaggtagctgagattacaggcacccaccacaatgcccagctaatttttaaatttttagtagagacagggtttcgccatgttggccaggctggtctcaaactcctgaccgcaagtaatccacccgccttggcctcccaaagtgctgggattacaggcgtgggctaccgtgccccgcatgacaataaattactttttactgaatatatgaagtaaataaaaagtaatgaggggccaggcatggtggcttacgcctgtaatcccagcactttgggaggccgaggcgggtggatcacctgaggtcaggagtttgagaccatcctggctaacatggtgaaactccatctctactaaaaatacaaaaaaaacttagctgggcatggtggcatacgcctgtagtcccagctactcaggaggctaaggcaggaaaatcgctcgaacctgggaggcggaggttgcagtaagccaagatcgcgccactgcactccagcctgggcgacagagcaagactcactctaaaaaaaaaaaaaaaaaaaaaaaaaaaaaaaaagaaagtaatgagactgagttcctgagttcttactccattctgaatataatgcttatgtatccaaatgagtatagactttcaaaatcataatcttatttaaaatataactggaatacttcttatgaaattattttttaaagcagatgtactacctacagaaaagagacgtgtaccgttgctttagagtcagcacttgctcagcccaaccattctctctctctcttctactcccacttcttccccttcctttttgcttttttagctccatctccttttatttccctgttattagtgcaactgagatgagaactctcagaagataaagaatcaacatgcaatggccatgctggtgctgatacagggctaagagatagacagacaactgaggctgcagacagaatactacgtattattttatgctcacatattatccacaatgaagtacaggagtacttcatagcatcatttatttatgtatttatttttgagacacggtcttgctatgttatccaggttagaatgccgtggcacaatcatggcttactgcagccttgaacactttgcctcaagtgatccttggacctcaacctccagaatagctgggactacaggtgtgagccaccacgccaggtaatttttgtagagatgaggtctatgttccccaggctggtctcgaactcctgagcttaagcaattctcctgccttgacctcccacagtgttggcattataggtatgagctactatgcctggctgatagcattgtttaaaaggggggaaaaaaaagaaaaaagaaaaacaccccggatcnnnnnnnnnnnnnnnnnnnnnnnnnnnnnnnnnnnnnnnnnnnnnnnnnnnnnnnnnnnnnnnnnnnnnnnnnnnnnnnnnnnnnnnnnnnnnnnnnnnntccacacaagcaagaatgggctgttttcatatttaaggacttgtgaagaacaccaacttgtaaaacttatagacacatacatatatactgtgatcctgtaaggcagtgttcatcaaatttgagcaatttacagataccccaccacctttttgtccagaacccattttagaggaaaataattattgcagcttctaaagaatatgtcctttaacacaagtttagacaacacctacttaaatgtacaggaaatgcccaacttacagacttctacagtttatgtatactagctccagccatcatgcttctctaaagcctctgtttaaaaaccaaaaacgaggagccaagatggccgaataggaacagctccagtctacagcttccagcatgagcgatgcagaagacgaatgatttctgcatttccaactgaggtactgggttcatctcactggggattgtcagacagtaggtgcaggacagtgggtgcagcacaccgagcgtgagccaaagcagggcgaggcatcacctcacccaggaagtgcaaggggtcagggaattccctttcctagccaaggaaagaggtgacagatggcacctggaaaatcgggtcactcctaccttaatactgcgcttttccaacagtcttagcaaacggcacgccaggagattatatcccgcgcctggctcagagggtcctacgcccacagagcctcactcattgctagcacagcagtctgagatcacactgtaaagcagcagcgaggctgggggaggggcacccaccattgtccaggcttgagtaggtaaataaagcggctgggaagctcgaacgtggtggagcccactgcagttcaaggaggcctgcctgcctcagtagactccacctctgggggcagggcatagccaaaaaaaaaaaggcagcagaaacctctgcacacttaaatgtccctgtctgacagctttgaagagagtagtggttctcccagcacgcagcttgagatctgaaaacggacagactgcctcctcaagtgggtccctgacccccaagtagcttaactgggaggcaccccccagtaggggcagactgacacctccaacggacgggtactcctctgaggcaaaacttccagaggaacgatcaggcagcaacatttgttgttcaccaatatccgctgttctgcagcctccgcagctgataccctggcaaacagcctctggagtggacctccagcaaactccaacagacctgcagctgagggtcctgagtgttagaaggaaaactaacaaacagaaaatacatccacaccaaaaccccatctgtacgtcaccatcatcaaagaccaaaggtagataaaaccacaaagatggggaaaaaacagagcagaaaactgaaaattctaaaaatcagagcacctctcctcctccaaaggaacacagctcctcaccagcaacggaacaaagctggacggagaatgactttgacgagttgagagaagaaggcttcagactatcaaacttctctgagctaaaggaggaagttcgaacccatggcaaagaagttaaaaaccttgaaaaaagattagacggatggctaactacaataaccacgcagagaagtccttaaaggacctgatggagctgaaaaccaccgcacgagaactacgtgacaaatgcagaagcctcagtagctgattcaatcaactagaagaaagggtatcagtgatggaagatcaaatgaatgaaatgaagcaagaagagaagtttagagaaaaaagaatgaaaaaaaaaaacgagcaaagcctccaagaaatatcggagtatgtgaaaagaccaaatctacgtctgattggtgtacctgaaagtgacggggagaatggaaccaagttggaaaacactctgcaggatattatccacgagaacttccccaatcgagcaaggcagaccaacattcaaattcaggaaatacagagaacgccacaaagatactccttgagaagagcaactccaagacacataattgtcagattcaccaaggttgaaatgaaggaaaaaatgttaagggcagccagagagaaaggtcaggtaacccacaaagggaagcccatcagactaacagctgatctctcggcagaaactctacaagccagaagacagtgggggccaatattcaacattcttaaagaaaagaattttcaacccagaatttcatatccagccaaactaagcttcataagtgaaggagaaataagatcctttacagacaagcaaatgctgagagattttgtcaccaccagacctgcccgaaaagagctcctgaaggaggcactaaacagggaaaggaacaaccggtaccagccactgcaaaaacatgccaaattgtaaataccatcaaggctaggaagaaactgcatcaactaacgagcaaaataaccagctaacatcataatgacaggatcaaatccacacataacaatattaaccttaaatataaatggactacatgcttcaattaaaagacacagactggcaaattggataaagagtcaagacctatcagtgtgctgtattcaggaaacccatctcacgtgcagagacacacataggttcaaaataaagggatggaggaagatctaccaagcaaatggaaaacaaaggcaggggttgcaatcctagtctctgataaaacagactttaaaccaacaaagatcaaaagagacaaggccattgcataatggtaaagggatcaattcaacaagaagagctaactatcctaaatatatatgcacccaatacaggagcatccagattcataaagcaagtccttagagacctagaaagagacttagactcccacacaataataatgggagactttaacaccccactgtcaacattagacagatcaacgagacagaaagttaacaaggatatccaggatttgaactcagctctgcaccaagtggacctaatagacatctacataactctccaccccaaatcaacagaatgtacattcttttcagcaccacaccacacccattccaaaactgaccacatagttggaagtaaagctctcctcagcaaatgtaaaagaacagaaattataacaaactgtctctcagaccacagtgcaatcaaactagaactcaggattaagaaactcaactcaaaactgctcaactacatggaaactgaataacctgctcctgaatgactactgagcataacgaaatgtaggcagaaataaagatgttctttgaaaccaacgagaacaaagacacaacataccagaatctctgggacacattcaaagcagtgtgtagagggaaatttatagcactaaatgcccagaagagaaagcaggaaagactaacatcacaattaaaagaactagagaagcaagagcaaacacattcaaaagctagcagaaggcaagaaataactaagatcagagcagaactgaaggaaatagagatgcaaaaaccccttcaaaaaatcaatgaatccaggagctggttttttgaaaagatcaacaaaattgatagaccgctagcaagactaataaagaagaaaagagaagaatcaaatagacgcaataaaaaatgataaaggggatatcaccaccgatcccacagaaatacaaactaccatcagagaatactataaacacctctgtgcaaataaactagaaaatctagaaatggataaattcctggacacatacaccctccctagactaaaccaggaagaagttgaatctctgaatagaccaataacaggctctgaaattgaggcaataattaatagcttaccaaccaaaaaaagtccaggaccagatggattcacagccgaattctaccagaggtacaaggaggagctggttccgttccttctgaaactattccaatcaatagaaaaagaaggaatcctccctaactcatttcacgaggccagcatcatcctgataccaaagcttggcagagacacaaccaaaaaagagaattttagaccaatatccctgatgaacatcaaagcaaaacttctcaataaaatactggcaaaccgaatccagcagcacatcaagaagcttatccaccatgatcaagtgggcttcatgcctgggatgcaaggctggttcaacatacacaaatcaataaacataatcagttacataaacagaaccaacgacaaaaaccacatgattatctcaatagatgcagaaaaggcctgtgacaaaattcaacaaccttcatgctaaaaactctcaataaattaggtattgatgggacgtatctcaaaataataagatctatgacaaacccacagccaatatcatactgaatgggcaaaaactggaagcactccctttgaaaactggcacaagacagggatgccctctctcaccactcctattcaacatagtgttggaagttctggccaagacaatcaggcaggagaaggaaataaagaatattcagttaggaaaagaggaagtcaaattgtccctgtttgcacatgacatgattgtatgtctagaaaaccccatcatctcagccccaaatctccttaagctgataagcaacttcagcaaagtctcaggatacaaaatcagtgtgcaaaaatcacaaggattcttatacaccaataacagacaaacagagagccaaatcatgagtgaactcccattcacaattgctacaaagagaataaaatacctaggaatccaacttacaagggatgtgaaggatctcttcaaggagaactacaaaccactgctcaatgaaataaaagaggacacaaacaaatggaagaacattccatgctcatgggtaggaagaatcaatatcatgaaaatggccatactgcccaaggtaatttatagattcagtgccatccccatcaagctaccaatgactttcttcacagaattggaaaaaactactttaaagttcatatggaaccaaaaaagagcccgcattgccaagtcaatcctaagccaaaagaacaaagctggaggcatcatgctacctgacttcaaactatactacaaggctacagtaaccaaaacagcatggtactggtaccaaaacagagatgtagaccaatggaacagaacagagccctcagaaataatgccacatatctacaactatctgatctttgacaaacctgagaaaaacaagcaatggggaaaggattccctatttaataaatggtgctgggaaaactggctagctgtatgtagaaacctgaaactggatcccttcattacaccttatacaaaaattaattcaagatggattaaagacttaaatatttgacctaaaaccataaaaaccctagaagaaaacctaggcaataccattcaggacataggcatgggcaaggacttcatgtctaaaacaccaacagcaatggcagcaaaagccaaaattgacaaatgggatctaattaaactaaagagcttctgcacagcaaaagaaactaccatcagagtaaacaggcaacctacagaatgggagaaaatttttgcaatctactcatctgacaaagggctaatatccagaatctacaatgaactcgaacaaatttacaagaaaaaaacaaccccatcaaaaagtgggcagaggatatgaacagacacttctcaaaagaagacatttatgcagccaaaagacacatgaaaaaatgctcatcatcactggccatcagagaaatgcaaatcaaaaccacagtgagatatcatctcacaccagttagaatggcaatcattaaaaagtcaggaaacaacaggtgctggagaggatgtggagaaatagaaacacttttacactgttggtaggactgtaaactagttcaaccattgtggaagtcagtgtggcaattcctcagggatctagaactagaaataccatttgacccagccatcccaatactgggtatatacccaaaggattataaatcatgctgctataaagacacatgcacacgtatgttcattgtggcactattcacaatagcaaagacttggaaccaacccaaatgtccaacagtgatagcctgaattaaggaaatgtggcacatatacaccatggaatactatgcagccataaaaaatgatgatttcatgtcctttgtatggacatggatgaagctggaaaccatcattctcagtaaactatcacaaggacaaaaaaccaaacaccacatgttctcacttataggtgggaattgaacaatgagaatacatgaatacaggaaggggaacatcacacaccagggcctgttgtgttgggggaggggggagggatagcattaggagatatacctaatgttaaatgatgagttaatgggtgcagcacaccaacatggcacatgtatacatatgtaacaaacctgcacgttgtgcacatgtaccctaaaacttaaagtataattaaaaaaacatttaaaaaattaaaaatataataaaaataaaaaccaataacggctgggcacagtggctcatacctgtaatcccagcactttgggaggctgaggcaggcggatcacgaggtcaggagatcaagaccatcctggctaactcggtgaaaccccgtctctactaaaaatacgaaaaattagccagacatggtggcacatgcctgtagtcccagctacttgggaggctgaggcaggagaatcacttgaacccaggaggcggaagttgcagtgagccgagattgcgccactgcagcccagcctccgtgacagagccagactctgtctcaaaaaaaaaaaaaaccagtgtgatggcatgtgcctttaatcccagctactcaggaggactgcttgagcctaggagttcaagaccagcgtgggcaacttagtgagaccctcatctcaaaaattaaaaaaaatcaataagtaaaaaaacccagcaacaacaaatggtagaataatctgaaaaagagagagattcttttccttctcccttcttgtacctattgttccttttgtcttgggatttcaaaactcaggccagtggcatttaagcttttttgatataacctgcagtttacgaggggaagcagtgatgcgtatctatacaaatttgtgtgtgtacatacacacaattgaacatgcttaactaaatgaaatgtatgctgttactttctatttcattttttaatgcttcttatgaggcactgaattttacaactaaacctagtccccatttacagcactcttaccatagaaaaatgcaaacctccaaataaacttttagattcaacttttaaatactacttatttataaattgaagaatgtctgtttatgaacttattcacttattttataatcataccgaaacctcagtgattcagaccaatttgacaggagcaattcaacatatgtagtacttttaaatgaagcttatcatatttaatatctctagatatgaaattagacccaaattaatctaacaaaatcttgacctggaggctctttggagtcctgctaaatcatcatttagcttgccattttctttactattttaattttaataaactttgaagaaaagatttctatataaagataaacttcaatccagacttttttttttttttttttttgagacagagtctctgtcacccagactggagtgcagtgatgcaatctcggcttactgcagcctctgcctccagggttcaagtgattctcatgcttcagccacccaagcagctgggattacaggcatgtgccaccacacacggctaatttttctgtaattttagtagagacagggttttgccacattcaccaggctggtttcgaactcctggcctcaagtgataagcttacctcagtctcccagggattacagacatgagccaccacaccaggccgtcagtccaaactttttatattgtctttaatttgaaatttaactattaattgaagcgtgttaacttgggcttaatttttaaaatggataagcataaccacctgatctaaaagttttattgctatagtagctcaatttaaatggtttatgtagaccaggcatgttggcttatgcctacaatcccagcactttgggaggtggaggcaacaggatcacttgagcccaagagtttgagaccaatctgggcaacacagtgagacatcatctctacaaaaaatttaaaaaaaaaatcaccaagctaattacatttccttatcgcttgaattacaaacatttaaggggagaaaagagcttataataatactgccatcttctctctctcccccatcattcctataggtgtaccaacattcgaccaggagagactggaatggatgtaacaagccgctgcacccttggagaccccaacaaactgccagaaggggttccccaacctgcccgcatgccctatatctcagacaagcaccctcgacaaaccttggaagtgattaaccttctgagaaagcaccgggagctatgtgatgtggtgctagttgtgggcgccaagaagatatatgcccatcgagtcattttgtcagcctgtagtccctacttccgagctatgtttacaggagaattggcagagagccgtcagacagaagtagtgatccgagacattgacgagagggctatggaattactgattgactttgcgtatacctcccagataacagtagaagagggcaatgttcagactcttctgccagctgcttgcctcctccagctggcagaaatacaggaagcctgctgtgaattcttaaagagacaattagatccttctaactgcctgggcattcgggcttttgctgacacacattcatgtcgtgagttgctaaggatagcagacaagttcacccaacataactttcaagaggtgagttgcacttggtgttccaatgcacccatttgttggagagcaatatgggttcacattctgctaaataacacttgcctgggtatttcctgctgattctaactcataatagcaaataaataagttattataaatcctaaacctggcttttattttagagggcaattttgtgttctaccagcaagttaagatttagggatttattctccctaactgtattcataaaagtatttaaaaaaaaatttttaaaaaggtttatttataagccaaaatagagtaattcacaagaggatctatgcctgataggatacctggtatcatgatttatataagatatttccttcctgattatgtggattattcagaataaattatagattataggttgtttggtaaactaataatctgaaaagatgagtttagatgttatcaaaataattttcattaaacctatctttcccttatttatttaacaaatatttgtaaagctactatgtttcagccactgtgcttgggagcatagggtacaatagtgaacaagaaatctagagtctctgtattcatggagtttataatctagcagggaagataatcattaaatgcttaattatacaaataattaactacagttaatgggtgttacaaagaagcagtcctggatgatttaagagtgtattacagagaaatttaactttggtgctggaacaacttgtgcaaaatcccaagacattaaaaagcatcactagtttgaagacctgaaaaaaacccagtgagacccagagaccaaggggggtagaggatgttacatagtgattacacagaaagaagagggctaaatcacactgaggttgatagactatgttaagaatttgagattggcctggtgcagtggcacatgcctgtgatcccagcactttgggaggctgaggcgggcagattgcatgagctcaggagttcaacactagcctgggcaacatggcgaaaccctgtctctacaaaaaatacaaaaattagtcgggcatggtggcgtgcacccttagtcccagctacttaggaggctgaggtgggaggatggcttgagcccaggaggtagaggttgcagtgagccaagatcgtgccactgcactccagcctgggtgagagagccagaccagaccctatctcaaaaaaaaaaaaaaagaatttgagattgatcctaagagtgctagaaaaccattaaagggttttaagcaaagacaaaacatggtctgttttacaactttttaaaaaatcatatttttatttattttgcagtaaagtggtcagctcaggaccatagtttttttccccgtaatagtttttggagaacaggtggtgtttgattatatgaataagttcttcattgatgatttctgagattttggtgcatccaccacccgagcagtgtacaccgtacccaatgtgtagtcttttatctctcacccacctcccacacttccccctgaatccccaaagtccattgtgtcattcttacgactttgcatcctcatagcttagctcccacttataagtgagaacatatcatttttggttttccattcctgagttacatcacttagaataatggtctccaaccaactccatccagattgctgcaaatgccattctatcttttttttttttttttttttttgagatggagtctcacttgctctgttgcccacgctggagtgcaacggggctcaatctcagctcactgcaacttctgcctcctgggttcaagtgattctcctgcctcagcctcccaagtagctgggactataggtacatgccaccatgtccagctaatttttgtatttttattagagatggggtttcaccatgttggccaggctggtctcaaattcctgacctcaagtgatctgtgatctgcttgcctcagcctaccaaagtgctgggattacaggcgtgagtcactgttcctggccaatatattgttcctttttatggctgagtagtattctgtggtatatatacataccacattttctttatccacttgttgattgatgggcatttgggctggttccgtatttttgcagttgtgaattgtgctgctataaacatgcacatgcaagtgtctttttcatataatgacttcttttcctctgggcagtaaccagtagtgggattgctggaacaaatggtagatatacttttggttctttaagaaatctccatatactgttttccatagtggttgcactagtccacattcccaccagcaatgtaaaagtgttcccttttcaccacatccatgccaacatcttttttttttttttaattttgaaacagagtctcactgtgttgcccaggctggagtgcagtggcatgatctcggctcactgcaacctccgcctcccgggttcaagcgattctcccacctcagcctcccgagtagctgggattacagggatttgccaccacaccaagctaatttttgtatttttagtagagatggggtttcaccatgttggccaggctggtctcaaactcctgacctcaggtgatctgcccgccttggcctcccaaagtgctgggattacaggcatgagccaccgcacccggcctatgtttttattttttaaattatggccattcttgcaggagtaaagtggtatcacattgtggttttgatttgctgatcattagtgatgttgagcattttttcatatgtttgttggccatttgtatatcttcttttgagaattgtctattggtctttagcccactttttgatggaattatttgtttttttccttggtgatttgtttgaattccttgtagattctggatattagtctgtggttggatctgtagtttgcaaacattctctcccactccgtgggttgtctatttactctgctgattatttcttttgctgtgcagaagctttttagtttaagttccatctatttatctttgtttttgttgcatttgcttttggttcttgatcatgaactctttgcctgagccaatgtctagaagggtttctccaatgttatcttctagaatttttatggtttcatgtcttagatttaagtctttgatccatcttgagttggtttttgtataaggtgagagatgaagattcagtttcattcttctacatgtggcttgccaattatcccagcactgtttgctgaatagggtgtcctttccccacattatgtttttgtttgctttgtcaaagatcagttggctttaactatttggctttatttctgggttctctattctttccattggtctatgtacctatttttatgccagtatcatgctgttttggtgactatagccttgtaaaatagtttgaaattaggtaatgtgatgcctccagatttgcttagccttcctttgggtatgtgggctcatttttggttccatatgaattttaggattgttttttctagttctgtgaagaatgatggtggtatttttatgggaattgcattgaatttatagattctcttggctgtatagacattttcacaatattgattctacccattcatgagcatgagatgtgtttccatttgtttgtgtcatctatgatttctttcagcagtgttttggtagagacctttcacttctgtagtgagatatattcctaagtattttatctttttttttttttttgcagctattataaaaggggttgggttcttgatttgattctcagcttggttgctcttcgtgtatagcagtactactggtttgtgtacattaattttgtaccctgaaactttactgaattcatttaccagttcttggagctttttggatgagtctttagggttttctaggtatacaatcatattgtcggcaaacagcgacagtttgactttctctttaacaatttggatgctctttatttcatttgtttgtttgttataagagatgaggtcttgctttgtcccccagctttgacctccagggcacaagcgatcctcccgcctcagccccccacgtagctgggactacagatgcgcaccatcatgcccggctaatttttgtatttttctgtagagacacggttttgccatgttgcccaggctggtctcaaactcctgagctcaggcaatccacctgcctcggtgtcccaaagtgttgggagtacaggcatgagccactgcacctggtcctggatgccctttatttctttctcttgtgtgattgctttgcctaggacttaaagtactatgttgaatagaagtggtgaaagtgggcatctttgtcttgttccagttctcagggggaatgctttcaacttttcctgttcagtataatattggctgcaggtttgtcatagatggtttttattaccttaaggtatgtcccttctatgccgattttcctgagcatttcaatcataaattgatgctagattttgtcaaatgctttttatgtatctaatgaaatgatcatatgatttttatttttaattctgtttatgtggtatatcacaattattgacttgcatatgttaaactatcccttcatccctggtatgaaacccacttgatcatggtggattatctttttgatatgctgttggattcagttagctattattttgtggaggatttttgcatctatgttcatcagggatactggtctgtagttttgtttctttgttatgttctttcctggttttggtattagggtgatactggcttcatagaatgatttagggaggattccctctttctctgtcttttggaatagtgtccataggattggtaccaagtcttgtttttttttggagatggagtcttgctctgtcgaccaggctggagtacagtggcacgatctcagctcactgcaacctccacctcccacattcaagcgattctcctgccttagcctcccgagtatctggaactacaggcacccaccaccacgcccagctaattttttgtatgttagtggagatggggcttcaccgttttgcccagactggtcttgaactcctgagctcaggcaatctgccacctcagcctcccaaagtgctgggattacaggcacgagccatcacgcctggcccaattcttctttaaatgtctgatagacttcagctgtgaatccatctggtcctggactttttttttgttagcaattttttttattgtcatttcaatctcactgttgttattggtctgttcagagtttctgtttcttcctggtttaatttaggagggttgtatattttcaggaacttatccatctcctccaggttttctagtttgtgcacataaggatgttcatagtagccttgagttatcttttgtatttctgtggtatcggttgtaatatctccctttttttttttttttttttttgagatggagtttcacacttgtcgcccaggctggagtgcagtggtgcaatctcagctcactgcaacctctgcctcccgggttcaagcaattgttctgcctcagctgggattacaggcacctgccaccacgcccagctaattttttgtatttttagtagagacagggtttcaccatgttgggcaggctagtctcgaactcctgacctcaggtgatctgcccaccttggcgtcccaaagtgttgggattacaggcgtgagccaccacgcccagccccattttgtttctaattgagcttatttggatcttctctcttcttttcttggttaatcttgataatggtctatccattttgtatatcttttcaaagaaccagcttttctttcatttctcttttgtactattttttctgttttatttcatttagttctgctctgatctttatcatttcttttttctttttttttttttttaatgatggagtctcgctctgttgcccaggctggagtgcagtggcgcgatttcggctcactgcaagctccgccttctgggttcacgccattctcctgcctcagcctctccaagtagctgggactacaggcacctgccaccacgcccggccaattttttgtatttttagtaaagatggggtttcaccgtggtcttgatctcctgacctcgtgatccacccgcctcggcctcccaaagtgctgggattacaagtgtgagccaccatgcccggcctatcatttcttttcttctgctgggtttgggtttggtttgttcttgtttatctagttccttgaggttttaccttagattgtctatttgtactctttcagaattttgatgtaggcatttaatgctatgaactttcctcttagcaccgcttttgctgtatcccacaggttttgataggttgtatcactattattgtcagtttaaagaattttttaattttcatcttgatttcattgttgacccaaagatcatttcaggagcaggttatttaatttccatgtatttgcgtggttttgagattccttctggagttgatttctccccgccgagaaagcaggcaggactttcaggccttgcccctccctgtctgccgtggctttggcttccgtgtcgtatctgcacttctcatttgcccccccggattctgcccaggaaaatttgcactcagtcaaattattacacagtttacctggaaatctccttctttctatggcccttccccagttccactggctgttctccccaaggacccctgtgagataaagtcagaaatggcttccctagggaccaggactgcctacagggcttttcctactgttgcttctacttttatatgtcagtaaattcacttcagctgtaggtaagattatatccttctcccataatctggattttcaggttcaccagtgaggatgtgtgttcagaggtgggctttgcccttctcatacttttgggcactcacagttttttggctttcagattttgcagctgcaagccacttctatcaaaggatctgtgaattattttcagttttcctggtatgttcctgtggtggttcttggagtaaaagttcacagtgtgaatctccacacactgttctgtctgtccaattgggggctgcaagttagtcctgcctcctatctgccattttttacatattttctattttatactttaataccacccttctgtccaccaggatgacctccaatggatcaaacgtttaaacatacaaaataaaaccatgaaaatattacacaatgatatggagcaatttctttataatcttgaagtgaaaaaggtctttctaattgactaacccagaaaagacagaagataaaattgatagatttgactacatacaattcaaaattttctgcatggtaaaacaaagcaaaataaaaattacaagacaaaagtcaaagccaagctggggaaaaatatctgtaaatcgtcctttctggtggtgatgaccttcccacaagaacatgcctcttgcaaaggatctccttcatccctctccagaagaggagaagaggaaacacaagaagaaatgcctggttcagagccccaattcctacttcatggatgtggaatgcccaggatgctataaaatcaccatggtctttagccatgcacaaactgtagttttgtgtgttggctgctccactgtcctctgccagcctacaggaggaaaagcaaggcttacaagaaggatgttccttcagatgaaagcagcactaaaagcactctgaatcaagataagtgggaaaccatctcgataaacacattttggataaaaaaaattgtaacttgtatcatagacgacattaatctccttatgtcaagagcttctgttggtcaataacacaaaccgatgacctaacagaaaaatgggccataaacagaaaagaaattcagattccccttaaacatatgaaatatgcttgtttaaaataactaaaacacaaaactacatcaaagtaacattttttatctatcagattacaaatatccagaagttttgtacaccctgttggcaaggctgtgggaaataagatcattgctagtgtgagtataaattagtacaacccttttgaaaggaactacggcggtatctatcaaagttacatactttttacacacactattttgactcagcttcctacttctggaaatttgtactacaggtgtactggagaatggaacagtttggcaccataaacaaggtcaacaaatcaataccaatgagatcatctgagaaagggagagagaagaaaaaagccctaaaatttttccaatattgagggataagtgactggcaatggtaacagggaatatttagagaggatagaagaaaagagcaagcatgggttgtgagatgcaaaggaagagattattttaagaaggatatatacgtatatatacgtgcagatatatacacatacgtgtatatacgtgtatgtatatacacgtatgtgtatatatatgcatatatcgtatgtatatgtgtacatatacatatgtacacatgtatgtatatacatgtgtgtatatatgtaaatatgtatatatacacgtatatttcagcatatatatatgctgaagtaaaagttattaatagtattaggcccattggccttaagaaacattaaaacattataaacattttggtactacagaagaatctacgcaggatgcaatccagacaccataaaaagattggtttgattgcataaaagttaaaattttttgttctttccaacataaaaagcatcatgaactaaaaaatcaatgtcaaactcagaaaatctatttggaacatacatgacagaaaaatggtaattcccatgagctcatccaaatttaatcagaaaaaaaaacatgaaaaatacaatggaaaaataagcatagggtataataaggaatgtgtaaaaaaaaaaaaaaaggtggtcaaatggaaaataaacatgaaaggatgctcaacctcacctataattaaagaaacatatttcaaaacaaaataccacttttttagccttatattggaaaaatactatttaaactttatttgaaaaatattcaaatttataggaaatcacaggaataagacaaaacttttatgtacgctttgtccagattcaccagttgttaacattttgcctcatttaccttgtcattctttccttgctctatgaatatttttatctgggtaattggagagtatattgccaatatcatattcctttactcctgaattctcctatactccttttatattcctttactcctttactttcatattcctttattcctgaacacttactatgatggttgcaaagtggtgatttttaaaaaaaaaaaactccattttctgtctacattctgctataagaaagaatttttcttaacccgtattcattgattagcactgtggactcatggcttattctattcagtagattagtgtcctttgttgctatttattattttgatgcatggtaggttctggtttatccgtcttgtgtttccttttggaaaattaaatacatgtatgttttcctatttctatgtctttcttgcatgctatatattttgttgcaccttgccttttaatattttctggaattcattccatattagttgttttagatggtccttgtttttcatagctgcattgtactccttgtgtggatgtaccactgttggttcaatcagtctccaatgtttgagcatttaggtagctttaaatattttgccatcacaaataatgctgcaatgaataacatcttatatgaacatgtcaatattgttggaagtttatctttagaataaattcctagaaataggattgcaaggcctaagtttaacttcatttaagtatcaccaatttctcttccatggggattgaatcattctaaccagtaatatatgaggataaatgtttgtccacagcctcaccaacagattgtattgccagcctttggaatttttgctaatttaacagataagaagggaatttcagtatcattttaatgtatacttctctgaaaataactaaagttgaacatctttactatttttaagggccatatgtataatttttgtgaattgtgttttaatgtattttgcccattttgctattaagatttttggttttttcttcaattttttaaagttctctatatattaacagtgttagccttttatccatgatacatgtcacaaatatttttttccagtttgcatttgtctttcaagtttgcttattgtatttttgataatacaaaagtttttggtttttttaaagtcaaatgtatcagtcttttcttttatggtatctggattttgaggcagagtttgaaaggtgtccccaaacccaggttacagagaaatttacacatattttttctagcatgtaaatggtcttagtttatctttgtgtatggtgtgaaatatggacctaattttatctttttccaaatggccatctagtctaaataccgtttatttaaaagcctttctttgccccactgatttcagatagcatctttattatacactaaatttctgtatgtacttggttttggaccttctgttctaggccatataccagtatgatactgttttctatttattatggcttaattactaaagttttataatgaattttagtatgtatgcggtaggactagtaaacccctccccatcatgtaactcttttgtttttcattgttttccaagctttcttgctatttatttttccagatgaactttaatgtcaccttatctagttccaataaaataacttgttggcatatttattgggatcatattaatttataagtaaacttaagaacagtcattttatgatgttgagttgtcctatccaataacaagattttatttcttcaattgtatttttgtatctcttgggaacgttttatggttttattcatctaacttttatacatttcttttttctttttttttttttttttttgagacggagtctggctgtgtcacccagggtggagtgcaatgacgtgacctccactcactgcaacctccgttcaagcaattctcctgcctcagcttcccgggaagctgagattacaggcgtgcaccaccaggcctggctaatttttgtatttttagtagagacaaggtttcaccatgttggccaggctggtctcgaatgcctgacctcaaatgatccgccctccttggcctcccaaagtgctaagattacaggtgtgagccaccccacccagcctacatttccttttaaattcacttcttagtattttttgttgctatcaaaaataggtttttctcctccattatatcttctaactggtaatcattaatgtatatgaaagctgcctcactgaattttttaattatttgtgttacatttaccattgattctttagagtttttttggaatcctattatatcacctgcatatcagtagttttatttcttcctttccaattgttcatgcttctaattgttttcttttgtctagttgcttgataactctagtaaaatgttaaatggtaatggaaatattgtacatacttatttgtttctgacattagtaggaatgcctctggtgttttcccattaagtaatatactggctttaggattgaggtatagatattttatcatgtttagaaagtatttgcttgaacccaggaggcggaggttgcagtgagctgagactgcgccactgcactccagcctgggcaacagagtgagactttgtctccaaaaaaaaaaagtattcatgtccaacaattcctattctcttgaatactttttattaggagcagtgttgaattttgtcaaagactttttcagtttttatggagataatcatatgaactttctccttaaacccattaatgtaacttacattaatggaatcctacaagtgaaaacatctttgaattattggcatacaccttttgattatggtggtgttagaatctattcgctaatattcagtatttttacatcaatattcataaatgatattagtctttaatttccttgtactgtctttgtcaagttaagtatgaatattatacttcatgaaaatgagttggaagttttcttcatgttctgtgctctgaaacaaatgtactatgcagactatggtctgtaaaagtttgatagaatttccctctgaaatcatctaggcttcgtgcttttttgtaaagtaatttattgttaagtttttctgtttcttctatgaaattttctttcttttcaggcatcaatttgggtaaactgtatttccctagaaaattaccaatttcatctaggttttcaaatttatctgtatagaggtatacaaagtaatctctttaatttttaaatttctgtagcagtggttatttacccttaatactttgattttgtatgtgtgtttttaatgtttctttcctgaataagttaactaataatccattttaacttttttcaaacaaagaggattttttacttattaattagatctacctttttgcttgattgtatttcattctggttttacctttattatcttcttgcttgtactttcttttggcttattctttttctagctgtttgagttgagacttaatttattttcattcttttgtattaactactataagtatttaaagctattcttctcggatcactagttttaatatatttaattgattctagtctttagtgcttcattatcattgttttatagaaattctgtttatatttctgtaactcaaaagctattaatagttttttttaatttctagatggaagggttttttgtgttttttaatttcatttttaattgctagttttagtgcactttgatcagtgtttgcagtaattctactctatgaaatttgctttcttggtaacctaatatatgatcaatttttctattttatgtgtgcttgagaaaaatgtgtattttctagtttctgttctcataatatagtatttgatatgtatgcataagatataccttattgattatgtcgcttggctcttctatattccttttttgtccttggacctgtgtgttaaagtctcttattatcagtgtgtctatttctctttatatcatctataggtagttactgtgttgccttatgcataatcataactttatgtcttgatgataaattgtgactttgagctttgtaaagtgttctcccttgtcagatttaattcatttgttgtctaagttctagtttgtctgatatctggatttcaactcgttttcttattgtttccatttgactgtatatatttgttcttcccattacttttagcctgttcaaaatatgatgttttaagtaattttcttgaattagtgtggaactgagttttgctttatgagcagatttgaaatcctttcctttaaataggcaatttaagcccatttgcatttattgctctgactgatatgtttgttttcaactctatcatatttttataaatagtacctgattcagttatatttactgtatttctttttctatgtggaatcttctttgctttttattttaatttcttttggtatataggaaagtttatatttttgttccactggttacttttacaaactagaaaagagcaaattaaacccacagtagaaggaagaaaataataaagattagaataaaaaccaagagctctttaaaaaaaaaaaaatgatgaaactccatctccatactgatcaagaaaaaaaaggaaagaagacacaagttaccagtaacagaaatgaaagagaagatatcactacaaattctttatacataagaaggatgatgaggaaatattatgaacaacattttacctataaattcagagatgaaataggcaaattctctgaagaaaacacaaattacaaaaactaagaagaaacagaaaaacagaataaccctatatctatgaaataaattgaattaataatttaaaaaccttctcacaaagaaaatgccagtcccagatggtgaatttatcaaaaatgtaaagaagaaataacactaatcctatgcaaagtctttcagaaaaggagaatgaagttaccaactcattttataaggccagaattgccctgattgaaaccacagacactaaaagaaaactacagatcagtatctctcatgatcttagatacaaaaattcttaactattagtaaattaattccaacaaagtataaaaggggaaatactatgacttaagtgtggtttatattattaattaatgttgatagaatcattatcttatactcacatttaatttctcattgaaaataatctaacttctttagatgccttgataacagacttgtctcttcatttcttcccactgttttcaaataccaaatccactttccaaaaataaagatttgccatcactgaggagctccaaaacaatatgctaaattaggctttggaccccactgggtgcagcacaccaacatggcatgtgtatacatatgtaactaacctgcacattgtgcacatgtaccctaaaacttaaagtataatttaaaaaatcagaaaaaaaaaagaattctctgcttcagaacgttcttggattatggtaatattctgtatcttgattgtggtcatgtttacatgagtatataatttatcagaactcattgagctatacacttaaaattttttttaatgtcttgctctaactataagttgcgtttcagatctaagatattcacaaatatctgaagaatattcttgatagtagagaaagttctgaaatcccttctagttctaatccttcctccaaagtgaacctgatacataccatattgaaatcccagtaaggaaatcttacccttgtttatcggactagcatggctccatgtaggtgcaaaaaaagtcatttggagcttaacatttgtgactcatttaaattatttttgaacttaatcaaatctgtatttaattttctcctacttcattagacctagcttaattcatacagtgttgctctgctcataaacatacatttttaaattgtctaaactcaacaattaagttcaccatatacttgttagaacaattccagatgactttgcttagtcattcgtgtttgttttcagctttattcattcttcaaatagcatctacattcatctgaagaaactaaaagtaaactgattaccataatcgtgtggggcttagagttcagatcgcctctaaactcttatttaagagtagatattgtgaagcattattttcttaacttggttatttgattcaaggatagactttagtgctagatctgcccaaatggcatatcattaatatcgttttactggtgggggaaaaggagaggtagcattttagccaggcatgtctatcaaaagtattatttttactctctgctcttagtgccaaatattttctcacccaaattttcatatcttcatgtcatcttgcgtttccattaaatgagttaacaccttagtagattattcataaacttcaaacttggtgatcattgatatttatataacatttggtttatactctgatgaaatttaaaaaaatgtttaggcacttcacaaagatacacaataccatacttaagtgaagaaatcacagagaaaaataagaggaaagcaagatgcagtcatgactaaacttttgcatgctgtgaagaccaatgcacttactagagctaagccccaaatttagcgctggactttatagtccctcaacacaaggttaacagataaaatacagggcacccaattaaatttaaattccagataaacaagtaatttatagtataagtatgtcttgtatttttgcttgccaaactaagccgccctaccacagagaaaaaaatgcaaccattctaattactaaattacctaagcaacctcagctaaaatttaaagggtaactatttaatttcctgaacctcagaaagtctctcactcagatggtttgcagatttatgccataaaaattgaagcattcattattatttctgctataaatataactggccttatggccctttactgttttgagatttgtattttttcctaatgcactcgagaatatttatttatttatttattttcttggtgatatggcctcacctgtctctcaggccagagtgctgtgatggtggtacacctacggcgtactgcagccttgacctcctgggctcaagtgatccattcacctcagccactggagtagaagggactacaggcacgcaccaccatgtccggctaatttttctttttctttttttttttttttgagatggagcctcactctgttgcccaggctgaagtgaaatggcgcaatcttggcttactgcaacctctgtctcccgcgttcaagtgattctcctgcctcagggtttcaccatgttggccaggctagtctcaaactcctgacctcaagtgatctgcctgcctcagcctcctaaagtgctggggttacaggcatgagccaccacaccaagccttagctaatttttttattttttatttttgtagaaataagttctcactatgttgcccaggctggtctcgaattcctgagctcaaatagttctcctgcctcagcctcccaaattgttaggattacaggcatgagccaccacacttggctaaggaaaacattcttaataaaatatttaaattatttttatgacctattgcatattctgctaaatattctgactttttgatgagcatgattataaccctgtcccaagagaatccatcaacttcattagaggtactgcctgcactaatagacatcacatgtagtacagtctcgtgagtaataatataacaaaccacgtgaagggtaggagtgactgtttctttcctctgcgttgcaccctgtcccttttactctacattctgatgaatggaattacaaggccttggaataggtggctggcctgtacaacaaggtaatatccttgttgccgtttcatctccattctgacagttgcctagccttgggtaaagataaattattggtgtttgtagattctcactagcatatatattagagagtttgatcgtcagagttttttcactggtctaatactctcctcattatattcattcttgtttacagaattgctgacactcttattcttttttgaaactgaccccttggtttttctgccctagacactgcctattcagcaactaatcttctgcaagctttttctgactttttatatgccttatatatctggagttatagtttgatatagttaatttgtcttattttgaatataaatttttattttgatcttttattttttaagtcatttttcttaaattgcttgactcacaaatgattatttttactaaattttaatggtgtcttctgtaccttcctttgttctcttttcaaatttttcctttcctctggtatcgtttgaaacttcagcgcattgtagaatacagctttgtcccataaccctgaagaaaaacactgagacaataaatgtgatcacaggatttttttttcttcttacctaactttgaacaggtaatggagagtgaagagttcatgttgcttccagccaatcaactcattgatataatatccagtgatgagctaaacgttcgcagtgaagaacaagtgttcaatgcagtgatggcctgggtcaaatacagtattcaggaaagacgtcctcaattaccccaggtaatgatagaaattcttctctaagaaactgctgaccgggcatggtggctcatgactgtaatcccagcactttgggaggccaaggcaggtggatcacaaggtcaagagatcgagaccatcctggccaacatggtgaaaccctgtctctactaaaaatacaaaaattagctaggcattgtggcgggcgcctgtagtcccagctacttgggagcgtgaggcaggagaatcacttgaaaccaggaggcgaagattgcagtgagccgagatcgtgccactgtattccagcctggcgacagagcgagactccatctcaaaaaaaaaaaaaactgcttagtactagatgagataatacgtatttgtcttgcaaacataaaacagttatcactccacattcgtctgtaagaaagtccatctgtttccaaataatcaaggaaataagtatttagaagcattttggttgcttattaatgtgggctttttgctcctttgctttccccgtattttggatcaattctacttttgaatgatagcacaattcaaaacttaaattgtataaaatgaacaaaagaaagcaaggatgcttcttttcctatagcttggaaatcctaccagttttccttcaatatgacttggaaatactaccacactttcaagagtaaagacatgatgcatcagtcatcactgagtgatcagtagttcacttaagacccattcttgttattgtgattatagtctttagcaattcaacaagatattcttctggattgtgaattaatttgagtccagctatagaagagcttataatgtcttgctgaacgtttttagtagttatgccttccttccttccttatttatggtattcggtgagatcccaaaacaattggaagcacagtagggtaccatgggtcatgtattctcttaaatagcttatagatgagagctcatgcctttaatagtgtttattggctgggtgcagtggtacaagcccataatcccagcacttgggaggataaggcaggcagatcacttgagctcaggtgtttgagaccagcctgggcagcgtggtgattccccgtttctacaaaaaaaaaaatacaaaaatttgttgggcatggtggcatgcacttgtagttgcagctactctggaggctgaggtaggcacatcacttgagcccaggagattgaggctgcagtgacctacgatcatgccactgtactccagcctaggcaacagagtaagacctatctcaaaattaattaattaaaataatggtgtttattttctcataggtgctgcagcatgttcgtttgcctttgcttagtcccaagttcctggtcggcacagtaggctctgatcccctcatcaaaagtgatgaagaatgcaggtatgagtgaccctggatgggaaaaatcaacaactaagcattcctattttttcctaatttccttatttgtattgcttcctaaatattgtattttgcagagctgaaaccagggctttaatttaacaaggttttcttctgggctagagtcaagaggaggaaaagaagaagagagaactgaacttccagtgtttcattccattaggtttttatgtgtggtgcttactggtgtagaagtggcaataaaaaggtagatttccaagattttaatgcaggcttgaatttaaagagtcaattctctgctaatattttttttttccttgagataattaaataatgctgttgactctgtcaatgaacattttttccttccatcacatatgtctggttggggaatagaatcagccttgctttctaaattgtggacagagttgaagatctgccactttctaaaacagctgtagaaagattttcactaaaactaggtgaagcagtttccagaggttttttgacgaaagaaactcttaactactttttcaaagggggggaaaaaagcaacctattttactaggctgtctttaaagtatatacaaaatgtaataaattacattcccaatttgacagattgtaagatttaggttcaaatctgaaatcatctgggattgttaaccatttttccccagcatgtcccaaatataaaagtgaaagagaaaatccatactcagaactttgtaaactacactgacctttgaacctcccttggtgattaaagacatttagaatgatccctgattctagaatggtggtaggacatgtagattcacttgcatttcttctataaactaaagcctgttcttttaacaggagaggctggaggggattttagatgtttctattttattttattgtatcttttttatattaatcattcttcatttttcagtttaccatagactagagttaaactagatttttgtattctatatttaaaacacagacaggccgggcgcagtggctcacgcctgtaatcccagcactttgggaggccgaggtgggtgtatcacctgaggtcaggagttcgagaccagcctcaacatggagaaactgcatctgtactaaaaatacaaaaattagctggacatggtggtgcatgcctgtaatcccagctattcaggaggctgaggcaggagaattgcttgaacctgggaggtggaggttgcggtgagccaagatcacaccattgctctccagcctgggcaacaaaagtgaaactcagtctcaaaaaaaaaaaaaaaaaacacacagacaaatggcaattaattctcctaaatatttgcagtagcaaaaaggaaaaccatgtacattatacatgctgaaatctgaagaaataatacatagatgccctcctccattaaaagtaaatcagattgtattgtactgattctgatgcagaaagtaaaagtacttatgaagtcatatttaaaagaagacccttcctgatatcctaacttctttttgctgcagtttcttcctctataaagtgaggatgataatagtgcctattccataaggctgttgtgaagattaaatgagtttatatctattaagcacttaaaaccaggactagcacatagctgtaagtgttgttactaccattaattttgtgttggtttgctcaatattatagctctatagtattatttgtaggaaccctcaaatgacctaacaagctattaggagatcaaagtctttgtcttttttttttttttttttgagacggagtctcgctctgttgccaggctggagtgcagtggtgcaatctcgactcactgcaacctctgcctcccaagttcaaccgattctcctgcttcagcctcctgagtagctgggactacaggcgcgtaccaccacacccagctactttttgtatttttagtagagacggggtttcaccatattggccaggatggtctcaatctcttgacctcatgatccaccgcccctcagcctcccaaagtgctgggattacaggcgtgagccactgcaaagtcattacatgtgtaattactagactcttctcttaaagtgtcttaacaagacaggaaatatgtctcggtagacttgttgagagtaaaccattcatatgttaccagatagcaaatttgtggcagtacagtgtttcttttcagcaatccgatttttgacccagttttattactttaatctagcaaataactattgccctggctgatgtgctaccttgctaatatcttgcagaatctaataaaatttattaaaaagtagtaactctgcagtgtggtaatcaaattgtaatttttacttttctataagttattgttggctgtaagcatgttgagctttaggctaaatttgcagtgagacatgagtcatgatggaaataccaatcaattcacaactcagtttgactggcattattggtttcatgtttgtgccaattttaatattggctggcattcatgatttggtttgatttatgcttgcttccctttgccaacctatatattcctaaactacattgggacttaactaacaatgtaatttagatatttggaataaaggcagaattttttctacagagacttggtagatgaggctaaaaactacctcctattgccgcaagaacgaccactaatgcaaggaccaaggacgagaccacggaaacctatccgatgtggggaagtactctttgcaggtttggatcttaatatactgttagtaaattgagtattttcccaggtgagaaactgtcatttgaaaaatcctttggacaattatgatatttactgtcataagacacaaataataagtcagcatatagcttgactcataacccatgattccacactgatatactccaaaagagtgctctattcttttttctcattcaacacctttaatatctatttttatataaatccaaaaatgttggctggtcacagtggctcatgcctatacagctttctggaggccaggcgtttgagaccagcctgggcaatatagggaggccccatctttacaaaaaataagaaaaacaattggctgagtgtggtagtgcatgtctgtagtcccagctacttgggaggctgagacaggaggatggcttgagcctaggaggtcaaggctgcagtgagctgtgattgcaccactgtactccagcctggggaacagaacaagatcctgtctcaaaaaataaaaaataaaaatgtcgtgcagtagatgttttgttgaaatgagtcacatgcattaatttatatatcaatgtgcagctcatcccataatcacatggaattgtgaaaaaacattaaacaattataatttatttctccattctatgcatatccatctataatttctccattctatccatatatacatattatctcataatcctatgtgaattggtatcattgccttcctttgtaaaatagacgtaatactaacttatttacagaattgattaaagattatagcaatcccagtggaatgagttgaagtcataacttgcattttgacctactactagagacatttggtgagtctaagcattaggtcacagtgaagttagtagtgagtgttacattttatgcttcaggataggattctcttgaccatttctgttacttccccagttggtggttggtgcagtggagatgccatttccagtgttgaacgatatgatccacagaccaatgaatggagaatggtggcttcaatgagcaaaaggagatgcggagttggggtcagtgttcttgatgatctgttatatgcagtaggaggccatgatggatcctcttatctcaatagtgttgaaaggtgagtaaggtcaatctgtaattttctctctactattcatatagttttatttgagatgttaattaggaaacaaattgatttaatgctttagtattgcatctgtggcactagttggcaacctaaacaagttagtatgatacacaaattctttatgatctggtctccgcctatttttctagtctgtctcccatgacacactaccactccctaagcatgctactacagacacatcaaattgcctgcagttccttggacatgctgcatgtccattccaagtcatacctctctccttacatatatgcatgctgttcttttttccctgggatacttctgccactttaagacttacatttcctttggccaggtgcagtggctcatgcctgtaatcccagctactcgggaggctgaggcaggagaatggccagaacctgggaggcagagcttgcagtgagccgagatcacgccactgcactccagcctaggcaaaagagcgagactccttctcaaaaaaaaaaaaaaaagaaaaaaaagacttacattttcttcaagacacaaatgttacttaatacatacaactttctatgataccatacagatgagttagttactagttacttgttcctttgcccttccataagtattttgaacatgtttgtacatatccatcacattgtactatacgtgttgaaatgtgtttcaccataatatctatcgcagtgactgggcacattgggaatctctagtaactgatgtttcaatagcttcttgctctcaagaagctgtgttgattaacagtgactctttgtttccataacacatctatgaaacgctgccgcatatcaagttctaaagatatagattgtgcagctggggaaaaatcttaaaaagcagagggatcagtcccatagaagtaaaacaactgcaacatggagaaacctcatctctacaaaaaatacaaaaatttactagttgtagtggtgcacgcctgtgagtcccagctactcaggagactgaggcaggaggcccgcttgagcctgggaggtaaaggttgccatgagatgagattgcgccattgcactctagtctgggtgacagagcaagactctctcaaaaaaaaaaagaaaaagaaaacaacacacacacttaaaaataaattgatgacatcacagaagggaaaaaataaattgatggcatcacagaagggatcatggcagacgggaggcaggactagactgaagctccagaccgggcaacatgcggaggcttgattgcaaatgttagctccagactgactgcaagaaaaaatcagcaatctcaagaggacccacagaccctctgaagaaagcggactgctcctgcagcacccgggagaaaccccaaatattgggagtgccccaactgcagaaatgggaaagggagaccctcctctcccaaacacacacccccactggagaagctgaaggtctgtttgcaggagaagtttccaactttacctggagctgagtcaagttagagaggcaagcgaaataacaggggtagaggaagcagcagaaaggccctgggagtttgctgggtccccaagcaggccattcctgcctggcaccacagggatccattgggagggtggccagaggagcaggggataaaactccccagggagaaggaattctctagctgaactttgtaacaatttgaacagggtgagaagcctcctgaccagaactcaaggtagggtgcaaatcctgcatgcagacttcaccggcagggggaaaactaaagcccttttctcttgcagctgggaggcggatagcctggggcaagcctgctgcccgcctgtggcctggaaacagactcagagttgtgagaggggcacggtgggagtgagaccatgggagtgagaccagcccttcagtttgtgtgggagctgagtgaggcctgtgactgccggctttcccccactttactgacaacctgcatgactcagcagaggcagtcataatcttcctaggtacacaactcaagtgacctaggaatctcttcccccatccccaacagcagtcgcaacaagacccgcccaaggagagtctgagctcagacatgcctaatcctgcccccacctgatggtccttccctgtccaccctggtagtggaagacaaagggcatataatcttgggagttctaggaccccacctaccaccagtctctctccacactactacagctgatgttttctggaaagcaccacctcctggcaggaggccaaccaacacaaaaatagggtattaaaccaccaaaactaaggatcctcacggagtccattgcaccctccaccagaacaggtgctggtatccacagctgagagacccatagatggttcacatcacaggactctgtgcagacatcccctactaccagcccagagctgagtagacttgctgggtggctagacccagaagagagacagcaatcactgcaatttggttcacaggaagccacatccataggaaaagagagagaatactacatcaagggaacacttcgtggaacaaaagaatctgaacgatagccttcatccctagaccttccctctgacagagcctaccccaatgagaaggaaccagaaaaccaaccctggtaacatgataaaacaaggctcttcaacacccccaaaaaatcatactaattcaccagcaatggatccaaaccaagaagattccctgatttacctgaaaaagaattcaggaggttagttattaagctaatcagggagggaccagagaaaggcaaagcccaaggcaaggaaatccaaaaatgatacaagaagtgaagggagaaacactcaagaaaatagatagcttaatgaaaaaacaaaaattcaggaaactttggacacacttttagaaatgcaaaatgctctagaaagtctcagtaatagatatgaacaagtagaagaaagaaattcagagctcaaagacaaggtctttgaattaacccaatccaacaaagacaaagaaaaaagaataagaaaatatgaacaagcctccaaaaagtctgggattatgttaaacaaccaaacctgagaataatcggtatatccgaggaagaagagaattctaaaagcctggaaaacatactcgggagagtaatcaaggaaaatatccccagccttgtgagagacctaaacatccaaatacaggaagcacaaagaacacctgtgaaattcatcacaaaaagatctttccctaggcacgttgtcatcaggttatccaaactcaagatgaaggaaagaatcaagagccatgagacagaagcacagggtaacttataaaggaaaacctaccatattaacagcagacttctcagcagaaaccctataagctagaaggaattggggacctatcttcagcctcctcaaacaaaacaattatcagccaagaatttcgtatccagtgaaactaagcatcgtatgtgaacgaaagataagccgttttcagacaaagaaatgctgagataattcgccattaccaaatcaccactacaagaacttctaaaaggagctgtaaatcttgaaagaaatcctggaaacacatcaaaacagaacctctttaaagcataaatcacacagtacccataatgcaaaaatacaagttaaaaagcaaaaacacaaaacaaaaccaaagtacataggcaagaaagagcactacgaaagtaaagtaacggtacctcacatttcaatactaacattgaatgtaaatgacctaaatgctccacttaaaaggtacagaaccgcagaatggataagaactcaccaaccatctgctgcctttgggagactcacctaacacataaggactcacataaacttaaagcagtggaaaaaggcatttaatgcaaatggacaccaaaagcgagcaggggtagctcttcttatatcagacaaaacaaactttaaagcaacagtggttaaaagagacaaagagggacagtatataatggtaaaaggctttgtccgacagaaaaatatcatagtcttaaacatacatgcacctaacactggagctcccaaacttataaaacaattactaatagacccaagaaatgagatagacagcaacacaataatagtgggagacttcaatattccactgacagcactagacaggtcatcaagagggaaattcaacaaagaaacaatggatttaaactataccttggaaaaaatggacttaacagatatatacagaacatttcatccaaaacccacaggatacacattctattcaacagctcatggaactttctccaagatagaccataagataggtcataaaatgagccccaataaacttaagaaaattgaaattatatcaagcactcactcagaccactgtggaataaaactggaaatcaactccaaaaggaaccttcaaaaccatgcaaatacatggaaattaaataacctgctcctgcatgagcattgggtcaaaaacgaaatcaagatggaaatttaaaaattcttcaaacttaatgacagtaatgacacaacctatcaaaacctctgggatacacagcaaaggcggtgctaagaggaaagttcatagccctaaatgcctacatcaaaaagtctgaaagagcacaaacaggtcacacctcaaggaactagggaaacaagaaccaatcaaacccaaacccaaaggaaataaccaagatcagagcagagcaaaatgaaattgaaacaaacaaacaaaagaccaaaagataaatgaaacaaaaagctggttctttgaaaagataaataaaattgatagaccattaccaagattaaccaagaaaaggagagaaaatccaaataacctcactagaaaatgaaacaggagctattacaactgacaccactgaaatacaaaagatcattcaaggctactatgaacacctttacacatataaactagaaaacctagaagagatgaataaattactggaaaaatgcaaccctcctatcttaaatcaggaagaattagataccctgaacagaccaataacaagcagcaagattgaagtggtaatttaaaaattacaacaaaaaaaaagtccaggaccagacggattcacagcagaattctaccagacattcaaagaaaaattggtaccaatccttttgacactattccacaagatagggaaagaaggaaccctccctaataattcataattcattctgtgaagccagcatcaccctaataccaaaaccaggaaaggacataactaaaaaagaaaactacagaccaatatccttgatgaatgtagatgctaaaatcctcaacaaaatactagctaaccaaatccaacatcatatcaaaaagataatccaccatgatcaagtgtgtttcacaccagggatgcagggatggtttaacatatagaagtcaataaatgtgatacaccacataaacagaattaaaaacaaaaatcacatggtcatgtcaatagatgcagaaaaagcattcgacaaaacccagcatcactttatgattaaaactctcagcaaaattggcatacaagggacatactttaataaaagccatctataacaaacccacagccaacatactgaatggggaaaagttgaaagcattccctgtgagcatggggtaaaagacaaggatgcccactctcaccactcctcttcaacatagtactggaagtcctagccagagcaatcagacaagagaaagaaataaagggcatccaaatcagtaaagaggaagtcatactgtcactgtttgctgatgatatgattgtttaccttgaaaatcctaaggactcctctagaaagctcctagaactgataaaagaattcagcatagtttccggatacaagattaatgtacacaaatcagtagctcttctatacaccaacagcaaccaagcggagaatcaaatcaagaactcaacttttttttacaatagctgcaaaaaaaaataaaatacttaggaatatacctaacaaaggagtcaaaagacctcaagacctctacaaggagaactacaaaatagtgcagaaagaaatcatagacaccacaaacaaatggaaacacttcccatgctcatggatgggtagaatcaatattgtgaaaatgaccatattgccaaagcaatctacaaattcaatgcaatcaccatcagaataccaccatcattcttcacagaattagaaaaaaacaattataaagttcatatggaaccaaaaaagagcccacatagccaaagcaatactaagcaaaaagaacaaatctggaggcatcacactacctgatttcagactatattatagagccatagtcaccaaaacagtgtggtactggtataaaaacaggcacatagaccaatggaacagaatagagaacccagaaataaacccaaacacttacagccaactgatcttcaacaaagcaaacaaaaacataaaggggggcaagaacactcttttcaacaaatgttgctgggataattagctagccacatgtaagaaaacgaaactggatcctcagctctcaccttatacaaaaatcaactcaagatgtattaaggacttaaacctaagacctgaaactgtaaaaattctagaagataacattggaaaaacccctcttgacattggcttaggcaaggatttcatgaccaagaacccaaaagcaaatgcaataaaaaaaaaaaaaaaacagctgggacctaattaaactaaagagctgttgcatggcaaaagtaacagtcagcaaagtaaacagacaatccacagagtgtgagaaaatcttcacaatctacatctgacaactaatatccagaatctacagtgaattcaagtcagtgagaaaaaaacaatcctatcaaaaagtgggctaaggacgtgaataaacaattctcaaaagaagatgtacaaattgccaacaaacatatgaaaaaatgctcaacatcacaatgatcagggaaatgcaaatgaaaaccacaatgcgataccaccttactcctgcaaggatggccataataaaaaaatcaaaaaccagtagatgttggtgtggatgctgtgaacagggaacacttctacaccactggtggcaatgtaaactagtacagccactatggaaaacagtgcagagattccttaaagaactaaaagtagaactaccatttgatccagtaatcccactactgggtatctactcagaggaaaagaagtcattaatcgaaaaagatacttgtacacacatgtttctagcagcacaattcacaattgcaaaatcgtggaagcaaaccaaatgtccgtcaatcaatgagtggataaagaaactgtggtgtatatagacgatggaatactatgcagccataaaaaaggaatgaattaacagcatttgcagtgacctggatgagattagagactattattctaagcgatgtaactcaggaatggaaaaccaaacatcgtatgttctcactgataatgtgggagctaagctatgaggactcaaaggcataagaatgatacagtggactttggggacttggggggaagagtggaagggggtcaagggataaaagactacaaatatggtgccatgtatactgatgcatgcaccaaagtctcataaataaccactaaagaacttactcatgtaaccaaataccacctgtaccccaataccccaataacttatggaaaaataaagaacacatcccagtttaaaaaaaattgatgggttaaagaagtgtagaaatagctaaatatttatgccttaacaatttagcctatatatgtcaaaatggatagaatgcaactaaggtggtacccaggggcaaatttacatgaattttagcttagatacattaatataacttatatgcatttggaaataaggaagatgcaaaataaatgaatcatgcttttaagtcatcactgaaaaggcaataaaacccaacaaacaaacaaaaatcaacgaaatttaaaaaaaagatatgtctacaaaaagagcaatttgataggatttttaaaaattaagcatactcggccggacatggtggctcatgcctgtaatcccagctctttgggaggccgaggcgggtggatcacgaggtcaggagattgagacaatcctggctcacacggtgaaaccccgtctctactaaaaatacaaaaaaagagacgggtgtggtggcgggcgcctgtagtcccagctacttgggaggctgacgcaggagaatggcgtgaacccgggaggcggagcttgcagtgagccaagatcgtgccactgtactccagcctgcgcaacagagcgagactccgtctcaaaaaaaaaaaaaattaagcatactgtttgctacagtaattctacctatcacccatttgcacaaagagaaatatataaggatgaacattgtttttaataggaaaatatcagaaacagcctaaggggtatatcagtaggaatataattaaataatgtataacacatataatagtaaaataattcaaaagaaaaatctagagctatattagcataaatagatctcaaaaaacgttgagggaaaaagcagtgcctactgtggtattatttatgcaaagaaaacatgcttgcatataaagaaatatatatatgtggatacatatatacctatatgaaagcattttactgaaaagtcttgaaggatatatgccaaatcaaaatgggaagagacaagaattcaggtggaactcaaggagggctttaactttatcaataatattctgatttttttaaagaaaatatattcatacataaatttcaaaaaataaaaacacaaaccagattttcaaatgttttggttattattaatcagcccatacttaggggaaataatatatatcatataaatccatggatttagaatatgtaaacatagccaagcttcctttgtgtaatacaaactctcctcttggtatgttcttttcaggtatgaccccaaaacaaaccagtggagcagtgatgtggcccctacaagcacctgcaggacaagtgttggtgtagcagtacttggaggctttctttatgctgtgggtggccaggatggtgtgtcttgcctcaacattgttgagaggtgatcttttttttaagtcattttccgtatttttattttaaagaacatagagctctttaaaagaaaaactacaggttgggcgtggtggctcacacctgtaatcctagcactttggaaggccaaggcaggtggattgcttgaactcaggagttcgagaccagcctgggcaacatggtgagataaaaaatacaaaaaaaaaaaaaaaaattagccgggcgtggtggtgcatgtagttccagctacttgtggggctgaggtgggaggatcacttgagcccaggaggttgaggctgcagtgagctgagatcacgccactgtactccagcctgggtgcaaagtgagaccctgtatcaagggggaaaaaaaaaaaaaaaagaaacaagtagagctgaatttaggacattggaggatccactattcagtggatttcccataggctttcagcaaaaagtcttcagttgatcttaaagtctaggaaaatgaaagatctaaaaaaagttttttttaattaacaaaaattatatatattcacagtgtacagcatgatgttttgaaatatgtataggttgcggaatggctaaatcaagctaactaacatattatctcacatacttatgatttatttgtggtgagaacacttaaaatctactctcaagtgtataatacgttgttattaactatagttactatgttgtacattagagctcttgaatttattcctcctctctaactgaaattttgtactcatttaccaagatttcctcactgcccctcaccttgccagcccctggtaaccaccattctactctctacttctgagttcaacttttttagattcctcatataagtgagatcatgcaatatttgtctttctgtgtttagcttgtttcacttaatgtcctccaggtttatccatgccgtcgaaaatgtcaggatttccttcttttttaagactgaatagtattctattcatatatgccacattttctgtatccattcatctgttgaggtacatttagcttaacttcatatctggtctattataaataatgctgcaatgaatatgagagtacaggtatctcttcaacatacttatttccattgaatatatacttagtagtgggattactggatcatatgatagttctatttttaatttttcgaggaacctccatactgttttccgtaatggctatactagtttacattctcatcaatggtatgcaggggtttccttttctccatattcttgccaacatttgttatctatcttttttaatatagtagccattctaacaggtgtgacatggtatttcattgtgattttaatttgcatttccctgatgataagtgatattgagcattttctcatatactgagccatttttatgtgttcttttgagaaatatctattcaggtcctttgcccatttttaaatcagattatttgttttcttgctgttgaattgtttaagttccttatatattttcagtattaaccttttattaaatgtaaaaacttcacatatgaatgggcatttggtagaaagtttcataaaagttttgggtgccgagcgaaagttgggggggagtttcaatagcatcatgcggnnnnnnnnnnnnnnnnnnnnnnnnnnnnnnnnnnnnnnnnnnnnnnnnnnnnnnnnnnnnnnnnnnnnnnnnnnnnnnnnnnnnnnnnnnnnnnnnnnnngtgagaacaaaatcactatacagtacaaagaggggacactgctaaaccattagaaactgcccccatcagggccaaggtggccgactagaagcagtggtgattggaggctcccatcaaaaaggaccataataagcatgtgaatccttcaccagcaaccaaggtattcaggttctcatcagaatggactaggggactggcgtgacccacggagaggaaagaagagcagtgtagtgaggtggcccacctgagagccacacagggcagtggagtccccagcccacagccaagggaggtggtgagtgggcatggtagccagctggggaaacagtgctttttccacagaactgggcggcccacagatcagaagatcccactcgcaaacccatgccactagggcctagtgtcccaaccccagagccgtacatattctcaatagcctctcagctagaatctgcttaagcctaccaagctcctggggggaaggggcaaccagcaccacggttgcagctgcctgctgtctaagccatttgagctccttgggggaggggcagcagccagcactgggactcacaactgcctaacacactgagctccctgggcaggggaaggatggcagccatctctatggctccaggccacacttttcccctgctggggccaggaaggctggacggcttggtcccaagatgtgtcccccacagcccaacacactggctgtgacatactgtgtccagagtgcctcttcaagcctgaccctgactcatccttcctcactgggcagggcttccctgcagggactccagtaactccagccagaggctcagggacagaacccggatctcctgggcctgagcccctagggggaggagttgccacagtctctggaccagcagacttagcctttcctcctggtagttctgaggaatccaggcagcccagaggagtgggtttcccacccagcaaagcacacccctccaccaagggacaaagtacttcattaaacaggtcctgttccctatgccacccaactgggtgagaccctccaacaggtgttgtcagacaccctatacaggagtgatcctactggcatcagtttggtgccccttgaggtcagaggtcccagaagaaggagcaggcactcatctttgctgttctcctccttgagtgacatctccaggcacaagaacgaaccagatgaatagggcctgaagtggaaccccccagcaaatcgcagtatccctacagaagagggatctgaccattgaaagaaaaacaaacaaacaaacagtaacaacacagcaaaaagcccccacaaaaaccccatccaaggatcagcagcctcaaagatcgaaactacacaaactcatgaagatcagaaagaatcaacaaaaaaatgctgaaaacccaaaaggccagagtgcctcttcccctccaaatgattgcattgtctctccagaaagggcgcagaactggacggaggatgagatgggtgaattgacagaagtaggcttcagaagatggataataaaaaactatgctgagctaaaggagcatgttctaattcaatatgaagaagctaagaaccttgataaaaggttagaggagctgccagctagaataaccagcttagagaggaacataagtgatctgatggagctgaaaaacacagcacgagaactttgtgaagcatacacattatcaatagctgaatcgaccaggcagaagaaaggatatcagagtttgaagaccaccttgctgaaataaggcatgcaaacaaggctagagaaaaaagaatgaaaaggaatgaacaaagcctccaagaaatatgggacttcgtaaaaagacagaacctatgattgattggagtacctgaaggagatggggagaatggaaacaagctggaaaacacacttcaggctattcaggagaacttccccaacctagcaagaaaggccaacatgcaaattcacaaaatacagagagcaccaccaagatactccatgagacgatcaaccccaagacacataatcatcagattctccaaggttgaaatgaaggaaaaaaatgttaaggacagccagagagaaaaaccaggtcacctacaaagggaagtccatcagactaacagtggagctctcagcagaaactctacaaggcagaagagatgggggggccaatattcaacattctcaaagaaaataattttcaacccagaatttcatatccagccaaactaagcttcatagtgaagcagaaataaaaccctttccagacaagcaaatgctgagggatttcattatcacaaggcctgccttgtaagagctcctgaaagaagcactaaatatggaaaggaaaactgctaccagccactgcaaaaacacatcaaaatataaagaccaatgacactatgaagaaactgcatcaactagtgtgcaaaataaccagacagcatcatgacagaatcaaatttacacataataatactaactttaaatgtaaaagggctaaatgccccagttaaaagacacagactggcaaattggataaagagtcaagacccatcagtgtgctgtattcaggagacccatctcatgtgcaaagacacacataggctcaaaataaagggatggaagaaaatttaccaagcaaatgtaaggcaaaaaaaaaaaagcaagggttgcaatcctagtctctgacaaaacagactttaaatcaacaaagattaaaaaaagacaaacaagggcattacctaatggtaaagggaacgattcaacaagaagagctaactgttctaaatatatatgcacccaatacaggagcacccagattcatagagcaagttcttagagacctacaaggagacttagactcccacacaataatagtgggagactttaacaccccactgtcaatattagatcaatgagacagaaaataaacaaagatattcaggacttgaactcagctctggatcaagtggaactaatagacatctacagaactctccaccccaagtcaacagaatatacattcttctcagtgctacatggcacttattctaaaatcaaccacagaattggaattaaaggactccttagcaaatgcaaaagaattgaaatcataacaaacagtctctcagaccacagtgcaatcaaattagaactcagaataaagaaactcactcaaaaccacacaattacatggaaattgaacaacctgctcctgattgactactgggtaaataatgaaattaaggcaaaatcaaaaagttatttgaaaccaatgagaacaaagagacaatataccagaatctctaggctacagctagttaagcagtgttaagagggaaatttatagcactaaatacccacattggaaaactagaaagatctcaaattgacaccctaacatcacaattaaaagagctagagaggcaagagcaaactaatccaaaagctagcagaagacaagaaataactaaaatcaaagcagaattaaaggagatagagacatgaaaaaccctccaaaaaatcaatgaatccaggggcggatttttttaaaaaattaacaaaatagactgctagctcaattaataaagaagaaaagagagaagcatcaaataggcacaataaaaaatgataaaggggatatcaccactgaccccatggaaatacaaactaccatcagagaatgccataaacacctctacacaaataaactagaaaatctagaagaaatggataaattcctggacacatacaccctcccaagactcaactaggagaagtccaatccctgagtagaccaataacaagttctgaaattgaggcagtaattaatagcctaccaaccaaaaaaattaaaaagcccaggaccagatggattcacagccaaattctaccagagttacaaagaggagctggtaccattccttctgaaattattccaaataattgaaaaggagggactcctccctaactcattttatgaagccagcatcatcctgataccaaaaccaggaacagacccaagaaaagaaagaaaacttcaggccaatatccctgatgaacatcaatgtgaaaatcctcaataaaatactggcaaaccaaatccagcagcacatcaaaaagcttatccatcattttcaagttggcttcatccctgggatacaaggctagttcaacatatgcaaatcaataaacataatccatcacataaacagaaccaatgacaaaaaccacgtgattatctcaatagatgcagaaaaggccttcaataaaattcaacatcccttcatgttaaaagctcttaataaactagatattgatggaacgtatgtcaaaataataagagctatttttggcaaacccacagccaatatcatattgaatgggcaaaagctggaagcattctctttgaaaaccagtacaagacaagaatgcccgctctcacaactcctattcaacatagtattgaaagttctggccagggcaatcaggcaagagaaagaaataaaagtgtattcaaataggaagagaggaagtcagattgtttctgtatgcagatgacatgattgtatatttagaaaaccccatcatctcagcccaaaacttccttaaactgataagcaaattcagcaaagcctcaacatacaaaatcaatgtgcaaaaatcacaagccttcctttacaccaataatagacaagcagagagccaaatcatgagtgaattcctattcacaatcactacaaagagaataaaatacctaggaatacagctaacaagggatgtgaaggaccttttcaaggagaactacaaaccactgctcaaggaaataagagaggacacaaacaattggaaaaacattccaacctcatggataggaagagtccatatcttgaaaatggccatactgcccaaagtagtttatagattcaatgctatccccatcaaattaccactgacattcttcacagaattagataaaactactttaaatttcatatggaatcaatgaagtccctgtatagccaagacaatcctaagcaaaaagaacaaaggtggaggcatcgcgctacctgacttcaaactatactacaaggctacagtaaccaaaacagcatggtactggtaccaaaacagacatatagaccaatggaacagaacagagacctcagaaataatgtcatacatctacaaccatctgatcttcaacaaacctgacaaaaacaagcaatggggaaaggatctcctattcaataaatggtgctgggaaaactggctacccatatgcagataattgaaactggatcccttcctttcgccttatacaaaaattaactcaagatggattaaagacttaaatgtaaaacccaaaaccataaaaacccttgaaggaaacgtaggcagtaccatttaggacataggcatgggcaaaacttcatgacaaaaatgccaaaagcaattgcaacaaaagccaaaattgacaaatgggatataataaaactaaagagcttctgcacagcaaaataaactatcatcagtgtaaacaggcaacctacagaatgggagaaaatttttgcaatttacccatctgacaaaggtctgatatccagaatttacaaggaacttaaacaaatttacaagaaaaaaaaaaccctatcaaaaagtgggcaagggttatgaacagacacttctcaaaagaagatttttatgcatccaacaaacatatgaaaaaaagctcaacatcaatgatcattagagaaatgcaaaacaaaacaacaatgagataccatctcatgacagtcagaatggtgattattaaaaaggcaagaaataatagtggttggcaaggttgtggagaaataggaatgcttttacactgttgatgggaatgtaaattagttcaaccattgtggaagacagtatggcgattcctgaaggatctagaaccagaaataccatttgacccagcaattccattactcggtaaatacccaaaggaatataaatcattctgctataaaaacatatgcacatgtatgtttgttgcagcactatttataatagcaaagtcatggaaccaacccaaatgcccatcaatgatagactggataaagaaaatgtggtacatatatactatggaatactatgcagccattaaaaggaatgagatcatgtcctttgaggggacatggatgaagctggaagccatcatcctcagcaaactaacacaggaatagaaaaccaaacaccgcatgttcttatgcataagtgggagttggtcagtgagaacacatggacacagggagaggaacaacacacaccagagcctgttgggggcatggggcgaggggagggaacttagaggatggatcaataggtgcagcaaaccaccatggcacatgtatacctatgtaacatacctgcatgtattctgcacttgtatcctggaacttaatgtaaaagaaaaaattttaagaaaaagaaactgcccccatgggccaatcacctcccaccaggccccaccttcaccactggggattacaatttgacatgagatttgggtggggacacagatccaaaccatatcattcttcctttggccctttcaaatctcatgtccatcttacattgcaaaatacaatcatcccttctcaaccatcccccaaagccttaacccatttcagcattaactcaaaagtccaaagtctcatctgagacaagccaagtcccttccacctatgagcctgtaaaatcaaaaacaagttagttactcccaagatacaatgggagtacacgcattgggtaaatactcccattccaaaagagagaaatcagccaaaagaaaggggctacaggcctcatgcaagtccaaaacccagcaggaaagtcattaaatcttaaagttccaaaataatctctttttactctgtgtcccacatccagggcacactggtatgaggggtggactcccaaagtcctgggcagcttcacccctgtggctttgcagggttcaacccacacagctgttctcaggggctgatgttgagtgcctctgccttttccagacacagggtgcaagctgccaatggatctaccattctgggatctggaggacaatggccctcttcttctcacagctccactaggcagtgtcccagtggagactaaatatgggggttccaaccccacatttcccctctccactgtcctagtagaggttctctgtgagggctctacccctgcaacaagcttctgtctgaatatacaggcttttccatacatcctccatacatacataggcagaggctcccaagcctcaactcttgcattctgtacacccacaggcttaacaccacatgaaagccaccaaagctatggattgcacattttgaagcagctgcctgagctgtacctaggcccctttgagccgaggctggacctggagcagctgggacacagggagcagtgtcccaaggctgtgcagaatggtggggccctgaacctggcccaaaaaccattcttctttcctaggtctctgggcctgtggtaggaagggctgccacaaagatctatgaaatgccttccagcccttttccccattgtcttggctatcagcgtttgctttccttttactttgcaatttctgcagcctgcttgaattcctccccagaaataggctcttcttttctaccacatggccagcctgcaaattttcccactttacattctgcttccttttaaacatagtccagtttatgtcattccttgtcatgctatacatagctgtagagcagcagccaatctagatgcttgtgttaaaaggctcctcaaaacctggatcatacttcaagtcaagtcataacctaggaaggccaaagcttcaagtcttgtaagnnnnnnnnnnnnnnnnnnnnnnnnnnnnnnnnnnnnnnnnnnnnnnnnnnnnnnnnnnnnnnnnnnnnnnnnnnnnnnnnnnnnnnnnnnnnnnnnnnnntttatatggctgccgattttcttttcttattttttttttttttcttgttttttcttctttgatggtacgtattgcttgcagatatgttctttactctgtagatggtctcttcactctgttgattgtttcctttgccatgcaaagcctttatgtttgatgtatcttactttttttgcttttgttgcctatgctttggggcacataacctgattttttcaactgtcacactgattgtacctaacattgaaatgttagaaatgtatttcagattatattctatatatatcaagcataccacttgtgaaatctgttctgatttttttcctgaatctacctggagtgtacttaatgaatgactctacttagacttcccccagagaaatgattacataataatactttgtataggacatcttataaaaagcttaaagtattttgtatatagactcattaatcattgaagtatacttagggaaatctaggtgggctgccatagtcactttatactggtgtacaaatagttaattttggtagaacagattttgttcttaatttcttctgtcagcttttcgtcattagattttagagtctcatgtgctatgattactgataagaacatatatttcatcctcacatcttaaaaagaaatgagtcatgactctaaaatttttgaggtagcatttactagtttaccatgtatatgttgaaacgtttaactgttgtaagtagagataaaatagaaggtaactcttgaaagctatgccagttcccttttatctctctgtcaagaaatctattttttcactttcaaaactcagtacaggaggttagcagcagtgatggcatagttttttaatatctccaaatgcccacataaaaacagatagagtaatagatagcaaagctaaaaacctatgtactagttctggagattggagttacacaacaatgtgaatatacttaacactactaaacagttaaaacatggttaagatggtaaattttatgttatgtgtgttttaccacaatttaaaaatcagaacctgtgaacaaaatttaacacaaaactaagggaaagaatatcctcacaaactccaaaacacaaacgggcaaagacaaactaccattagccacaagacctgcatgatattagtatcttcaggagaaatcagaaagaagcaattggatgtctgacagatctaagaacaaaagaacctcaaactagctaacacgtagtaaatagaaagcacaaggggaaaatttatcagcaactgaaactagaaacagttttgtccactgccatagagtgtaagtgcaagaccctcaataagatctaaagggcttagaagagggtttctcaacctcaacactactggcgttttgggtcagacaattctttgttgtgggggactgtcctgtgcattgtaggatgtttaacagcatccatagcctctaccaactaagtgccagaagcatgtgcctggttgtgacaaccaaaaacagtctctaaacattgccagatgttacttaggggatgagaaaggggggatgaaggggaataaaataacacctggttgggaaccagctgagttagagccatctagtccctgggaactctcaaaactgaccagccaggataatcttccaggtcaggaccctacactgaggagaatcaaaattaagcaggacgagggcaacagatgcccttgttttccttgaaaagagaaagccaagacaaaagtaaggcagtgaataaagtcaataaatctctggactaggcgctgtggctcacacccataatcccaacactttgggaggcctaggtgggaggattgcttgagtccaggatttcaaaccagcctgggcaacatagcgagacgttgtctctccaaaaaataaaaaaattagccaggcttggtggcatacacctgtggtcccagttactcaggaggctgaggtgagaggattgctgggaggtcaaggctgcagtgagccatgattgctccactgcactctagccagggtaatagagtgagaccctgtctcaaaaaaaaaaaaaaaaaaaaatttaaggataccccattctttatgatgtgattatttcacattgcatgcctatatcaaaacatctcacataccccataaatatatgcccaaaagttaaaaatacaaaaaaatttaagtaataatctctgaaggcaaggcactatgttttttaatactacataaaaaaaagaaggagctccacaaagttagaaaaactgtcacaaaccactcactcctatttctaaaagttcaggaaaactcatttcatgtaaaaatgaaatagcaaagtattgagattagattccatacaaagttaatataagaagagagaataagcagcagaataacatctctacagacaataaaagcacactagaaagacacacctacagatcaaaaccttaactgtttcaaaatgtgataaaagacattaagaaaatgataacagatatgaaactacataaatcagaagtagaaaaattcagaaatgaagtgacagaactcagaaatgtattagaaatgaaaggaaaaatcatttcagaatgaagattaaaggataataagcaaaacagataatgccataagacaaatagaaggcgaaaagaggaaatattttaaggtcaaaaagaaatgaaggccgggcacagtggctcacgcctgtaatcccagcacttctggaggccgaggcgggtggagcatctgaggtcaggagttcaagaccagcctgactaacatggtgaaaccccatctctactaaaaatacaaaattagccggatgtggtggcaggcacctgtaatcccagctacttgggagacttgaacccgagaggtgaaggttgcagtgagccgaggtcgcaccattgagctccaccctgggcatcaagagcaaaactctctctcaaaaaaaaaaaagagagaggaaaaaaaaaaacaagagataccatttgagagatagtaacaaatattgaaaataggtaaaaatctattatacaggtgatagcagtccttaaagaagaaaaccaaagggaggaaacagaatgaatactaagaactataatccaaagttactttcctataattaaaaaaagaaacttttttgaaagaatacgctatatccttcgaatattgacccagaacaccaagacatatgctaataacatgactgtaccttgaagaaaaagaaaaaattccttagacatctacaaaaaagtacatgttacttgtaaggaaaagaaacttagattatcatctggctttttaaaagtagtagttcatgccagaagaaaatagaattgcatgttttagatattcaagaaaaacgtgagccaaggattttataccttgagaaactgactttgaagtacaaagggcacagacaactattaacaacatgtaagaaattagggaatcttgttcccttgagccctctaggagaacaaacttcagacaaaattactagaaagacattgacagaagggctagaccatgtggttcacacctgtaatcccagcactttggtaagccaaggtgggaggatcgcttgagactaggagttcaaggctgcagtgagctatgatcataccactgcactttagcctgagtgacagagcaagaccgtgtctcttaaaaataaatacatagatacatacagttaactgtagaactatgactaaatgaagattaaaagggggagggctgggtgtggtagctctgacctataatcccagcactttgggaacccaaggtagaagtacgacttgaggccaggagtttgagaccagcctaggcaacatagtaagaccctatatgttaaaaatgtatatatgtatattttttaattagccaggcatggtggtgcacacctgtattctcagcgactcagaaggctaagacaggagattgccctgagcccaggagttcaagattataatgagctatgattgcaccactctaccccaccctgggtgacagactgaccctgtctctaaaaataaaaataaaagggagagagtgtagcatgctctagctatgtactcaatccatgtaaatgtagtacaaagaagaggtatgcaaaaatgaattttaattgttctcagggatattggagtgataatattgctattctgttatgtgtataaatgtagaataaaggaaatgagtatgcattattctaattctgctctctcctttgtccttgaaaaccagagtgtggaggtagaagaagaaaaggttgcaaaatagaagttaaataaagtatcttgtagtcctgagtatgaatttgaactaaattcctcttttgaaaaaatttctatatattctagcttgtcaactgagaaagcctcgaaataaagtgtcagtgaacatctctactcccagattgtatcttgaaattttatttcccacttaaagaaaccagagcttattggaaaatgtctgattccaggtttagaacaggaaatgtgcagatgagtctgtacccttttgtcataccaaatagcaagcaagctgtcaaagaccgctaagagtcaaaaagactcaggagccaacttgaagatgttcccactgaccaaagataacataatttcagctttaaaagggataattgcaatagattgaaatccaataaatacacttaaatatatgagttcttaatgataaactttttaagactaattggttgcctttggaagatcatatggaacaaatttattatctcaaaacataaaatgaagtgaacatatatcctgcttttcttataagaactgtattattatattgattaaccaaatagttaatattattatattgattaaccaaaccatattattatattgattaaccaaataaaaggattgtttctttataaaattatcccaataaaagaaaataagtgattatcattttgcaacactcagtaaattagtgtatctagacattgataaacagctgctaacataccaccttctttagtcttgttaaaggaaccaaacatggtctgatcaaatttctggatccaactaccaatttgcccaacataaaaaggacagagcaacagattggactgcactatgaacgtacagtcaaccaaatccatattatggggaaaattgtcatacactctgggttctaaaacagatgaattgcagggaagaaaaggaatggagagaaaacctgtagacaataagagactttttaatttaatctgatttttttagagacagggtctcactctgtcacccaggctggagtgcagtggtgcaataatagctcacaactgtctcaagcaatccctgcctcatcctcccaagtagctgggactgcagatgaatgccgctatgcctggctaattttttttccaatttttttatagagataaggtctctctgtgttgacgaggctggtcttgaactcgaacttgtggcctcaagcagtcctccagcctcagccttccagagtgctgggattacaggcatgagccaccacacacagccttttttttttttatcttttttttaagtctcagccagacacagtggctcacctgtaatcccagcactttggggggccaaggtgagaggattgcttgaggccaggagtttgagactagcctggttaacacagcaagacccctatttttaaataaataaatattaattaaataaataaatattaattaaaatttttttaaatgtaatgttaagtaagattgaagtgtctagggatggcactttctgtatttgagttttataataaaaaggttgtctcaaagaactatgcaaaagacttctactttctaataggatgtagtagagagtaacagccatcacccccactacaacgactaggaaaaaaagacaaattacaaaaatcatattttaaaatacatcagaggcatttcaaagtaatgaccaaatgaactaaaattccattgaagaaagagcctgtgttgccagccgggcacggtcactcacgcctgtaatcccagcactttgggaggccaaggctggcagatcacgaggtcaggagatcgagaccctcctggctaacatggcgaaaccccatctctactaaaaatacaaaaaattagccaggcgtggtggcaggcacctgtagtcccagctgctcaggaggctgaggcaggagaatggcgtgaacccaggaggcggagcttgcagtgagctgagatcacgccacttgcactccagcctgggcgacagaccaagactccatctcaaaaaaaaaaaaaaaaaagagaaagagcctgtgttatgtgagctgaagtcataggttgttttctttccttgggacattttccaagtatgagtgtagaaaatagcttaatagctggcacagatataaattctaagacgtttttctaatgactaagtaaaatgttagattttcattgcacatttgactatagcaagtccgtgtactcagtatatcgttagtgtgatttcagatcttatgaaaaaggcttcacttaataagaacaagcatacagtctggtttccctcactgcaggtatgatccgaaggagaacaagtggactcgggtagcttctatgagtaccagaagactaggtgtggctgtggctgtgttaggagggttcttatatgctgtaggtggctctgacgggacatctcctctcaacacaggttagtccctcccaaaggcaatcaggttccccaaaagcagaacattttcctggagagtcctcctacaaaacgtgtagaaactccaggttatcctataatttactaggaaaatgcctgatttttccctccagcagagtgcagctctcagctcttcctcagctcccactgtagtcatattctaagtacgttccccaaatatttatttcttcccctgctttccaagctgctggaaatttataatgaattttaaaaactactttcttatataattagttccttttcctccatcacaacttctcctcaaaaccacaacgtactctaatccaagaataaataaaaacttagaactacaaattcgtttatttgggttttgtttttgtttgtgtttttatgacagggtctcgctctgtcacccaggctggagtccagtgccacaatcttggctcactgcaacctctacctcccggactcaagcaatcctcccacctcagcctcccgagtagctgggattatacgtgtatgccaccacacttggctgatttttgtatttttagtagagatggggtttcgctgtgttgcccaggttggtctcaaactcctgagctccagtgatctgcccacctcagcctcctaaagtgctggaattataagtgtgagccactgcacctggcctggtttgttattcctttctatttagatagtatgggtatttttgcctaaggatattgtcaatgtgacagtcacaccagattcgtcacgtcttgtcttctcttcagaagcttaaaatgcactgtgctataggggagggaatacaggagtacagaagttgtctgattatgatgataaattgttagtactgaatggtgcttattgatcatgtagtcaggctccccatttaacgataaggagagtgaggctgagagtcatgtagctaattagtcatttagataaaactagaaccagagtatctggatcccaacacgtgccctttccactgtaccatacctagaagaaaccagtccctgatgagagtatatgtagtattgtccagaggtatacaaatccttctcagaagcaaaaatcagatcatgtgttgaaaatatgtgttatcacaaagtatcagtggctataaagaaaactggaggtgagaggaaatggttgaatgctcacttactggtttttcttttccctacagtggaacgttacaatcctcaggaaaacagatggcacactatagcccttatggggacccggaggaaacacctaggctgtgcagtatatcaggacatgatctatgctgtaggaggtagagatgacactacagagctgagcagtgctgagagatacaaccccagaaccaaccagtggtctccagtggtggccatgacatcacgccgtagtggagtaagtggttatggacacttaggttgcttccaaatcttggctattaatagtgctgcaataaacatgggagtgcagatatctcttcattatactggtttcctttctttggggtatatacctagcagtaagattgctggatcatatgatatttctatttttagttttttgaggaacctccaaactgttgtactaatttatattcccaccagcagtgtaggagggttcccttttctctgcatccttatcagcaatcgttatggcctgacttttggataaaagccattttaactggggtgagatgacatctcattgtaattttcatttccatttctctaatgatcagatgttgagcaccttttcatatacctgtttgctatttttatgtcttctttggagaaaggtctattcagatcttttgcccactttttaattggattattagtttttttctattgagttgtttgagcccttatatattctagttattaatcccttgtcagaagagtagttttctcccattctgtgggttgtctcttcactttgttggttgtttcctttgctgtgcagaagctttttgacttaatgtgatcccatttgtctattttttctttggttgcctgtgcttgtggagtattactgaaaaaaatctttgcccagaccaatgtcctggagagtttccccagtgttttcttttagcagtttcattgtttgaggccttagatttaagtctttaattcattttaatttgatttttgtatatggcaaaaaatggggtctagtttcattctgcatatagttacctggttttcccagcactgttaattgaagagattgtcctttccccaatatacgttcctagcacctttgtcaaaaaaacagttcgctgtagatgtataggtttatttctgggttctccattctgttccattggtctatgtgtctgtttttattctagtctcataccgttttagttactgtagctctttagtataatttgaagtcagataatgtgattcctccagttttggtcttgttgctcaagatagctttggctattctgggtctttgtggttgcatatcaattttaggattattttttctatttctgtgaagactgtcattggtattttggtagggattgcattgaatctgtagattgttttggatagcatggacattttaacaatattgattcttccaatccatgaacatggaatgtcttttcatttttgtgtgtcctcttcaatttcttgcatcaatgttttctagttttcattgtatttttcacttctttggttcagtttattcgtaggtattttatttatagctgttgtaaataggattactttcttgatttctttttcagattgtttgctgttggcatatagaaatgctactgatttttatatcttgattgtgtatcctgcagctctgctgaatttgtttatctgttctaatagctttttggtggagtctttaggtttttccaaatacaaaatcatactgtaggcaaagaaggataatttgacttcttcctttccaatttggatgccctttctttctttcttttgtcccattgctctacctaggacttccagtactatactgaataacagtggtgaaagtgcgcatccctgtcttgttctagatcttagaggaaaggctttcagtttttccccattctaaatgatgctatctgtgggtctgtcatatatggcttttattgtgttgaggtatgttccctctgtacccagttttttaagggtttttatcatgaagggatgcttacttttatcaaatgctttttcagcatcaattgaaatgattatttggtttttgtccttcattctgttgatatgatgtaccacactgattgatttgcatatgttgaaccattcttgcatccctgggataatttctacctggtcatgatgaattatctttctaatgtgtcattgaattcagtttgctgggattttgttgaagatttttgcatcattgttcattgaggatattggactgtagctttctttttttgatgtgtctttgtctggttttggtatcagggtaatactagcctcctaaagtgagtttggaagtgttacctcttcctctatgtttggagtagtttgataggattagtattaattcttctttaaatatttgataagattcagcagtgaggccattgggtcctgggcttttctttgccggaagatttttttttcttttttttattatactttaagttctagggtacatgtgcacaaagtgcaggtttgatacataggtctacatgtgcctacatgtgccatgtttgctgcacccatcaactcgtcatttacattaggtatttctcctaacgctatcactccctcagccccccaccccccgacaggccctggtgtgtgttccccgccctgtgtctaagtgatgtcattgttcaattccgctgggagattttttattacagctttgatctcattacttttttgttttgttttgagacagggtctggctctgtcaccaaggttggagtgcaatgatacaatgtcggctcattgcatcctccacctcccaggctcaagccttccttccacctcagtctccccattagctgggactacatgtgcacaccatcatgcccagctaatttttgttttttgttttttttttggtagagttggggttttgccatgttgcccagcctggtctcaaactcctgagctcaagtgatctattcgcctcagcctcccaaagtgctgagattacaggcatgagccaccacacttagccttattacttgctattggtccgttcaagttttagatttcttcatggttcaatcttggtaggttgtatgtgtctaggaatttatctgtttcttctagattttctaatgtattggcatatatttgttcataatagcctctaattatcctttgaatgtctacggtatcagttgtaatgtctcctttttcatctctgattttatttatttgggccttcttttttcttaatctgcctaaaggtttgttgattttgtttatctttcaaaagtcaacttttcatttaattgatcttttgtgtttttttcacttaaatttcattaatttctgctctgatctttattgtttcttctcattttggatttggtttgttcttttctagttctttaagatgcattgttatgttatttgaagtttttgtacttttttgatgtaggctcttattgctataaactttcctcttactttcactttatgtccaaaaccgctttataggttttggtatgttgtttttccattttcatttgtttcaagaaacttttaatttcttcatttcttcattgacccactggtcattcaggatgcttttaggtaaatcaagccctgctaatttgacactagaaaataatgaatttcttttgattatttttatctcatgtagttgaaaaattttatgtcgtcatatctttaattagagaataattttttaggatttctccttttttttttttttttttgagaaggagtctcactctgtcacccaaactggagtgcagtggtgcaatctcagctcactgcaactttcacctcccaggttcaagcaattctcctgcttcagcctcccgagtagctgggagtacaggcgcgtgccaccatgtccagctaacttttgtatttttagtagagatggggttttgccatgttggccaggctggtctcaaactcctgacctcaggtgatccacccccctcagcctcccaaagtgctgggattatagacataagccactgcacctggcttttaggatttatcctgtatccattgcttttctgaaacaatctccccaaattatctactaccttatctaaattaatattagatctatatattgcaacttaatgtttctagctaatagtcttaagtagttggcatactaatacaaatgtttaggcaaaaatacatctggctccacccctagtccccacaaactagtttgagtctatcctatctatagtatagaccagatcagactgccctgggacatgttctagaccatggatggcctgtaactcaagagacttctgggcgaagtatagaatttatcatcttgggatgtttgctgagagcaaaatataacccattaaccactgatcatgtcaggagttcatcgagacatccacaacaggaaggagaagcaagcagtagctaagcactccacaatctgaggataaaagagagtgaattctggtttgcgtaaatcaaggaacaccactggaaggtgtcagcaagtcaaagccttcacatatctgtggctttttattactgacaactaacaacatcttagtcacattcctgttaagtgttcgctgtgtgttgggaaagcaaaaatgagtatggcatgattcctctccttaagtagctcccaatttagtgaaggaaattgaaatgtttacagctaactataataaataaaccctacagtagtgttatatattttatagaagaacataggagaatgcgcttactgctttggggaagtaagaatgagttggggcagtgaagagactaccaaagacagtcacatgtaagctagctcatgaaggaagaataagcttttctaaaagacagacagaaaacagtagccagggccaggtgcggtggctcatgcctgtaatcccagcactttgaaaggcagagacaggattacttgagcccaggaatttgagacccgcgtgggcaacatgtgggaccccatctatacaaaaaatttaaaaattatccagatgtagtggtgcatccctgtagtcccagcaacttaagaagctgaggtgggaggatcacttgaacctaagaggtggaagctacggtgaactgtttttttgttttattttgttttgagatggagtcttgctctgtcatctaggctggagtgcagtgtgcgatcttggctcactgcaacctccacctcccgggctcaagtgattctcctgcctcagcctcccgagtagctaggactacaggtgcgtgccaccatgcccagctgtttttttgtatttttaatagagatggggtttcactatggtgatctgtgatcctgccactgcactgcagcctgagtgacagagcgagaccctgtgagtgagagagagagagggaaagagggagagggagagagagagaggagggaggagggagggaggtgggggaggggaggggagaagaaaacaccagccagggaacatgtgcaaaagtgtggaggtgtgaaaaatgtatgttatcttcagggactagcagttaatccagttttactgcagcaataggattcattagttaggagtaaagggaaactataagaggtgaggcttaaatagtgggctaagatagatttctggagggcctgagtaacataataaggactttaaaacttacccttaaatagtagggaggcttagaaagttgttttggttttaggagatttttttgagagggtcccactctgctgcccaggctggagtgcagtgtacacaatctcagctcactgcaacctcgacctttcaggctcaagcagtcctcctgcctcagccttccaagtagccgggactacaggtatgccccaccacacccagctaatttttgtattttttgtaaagacagggtctcactgtgttgcccaggcctgtctcgaactcctgggctcaagcgatccaccgacctcagcctcccaaagtgagaaagtttttagaggaaagtgacaatatgattagatttatatttttctgttttactttatttttgtagagataggggtctcactgtgttgcccaagctggtcttgaactccaggcttcaagtgatgctcccacctgggccttcccaaagtgctgggattacaggcatgaggtaccatgcctggcctagatttgtatttttaaaagagaattttactagcaattagaaagattagagcaggcaaataccagaggaagtgagagcagtttggaggttgtttgctcacttctagtgaacagtttttctaaaatttaagaaatacatgttttggattctgtgtgaatattctaattgaatatataattttatagttcccataatttgatagacttttgttgttacattttccctgtgtttcagtaaaccagaatgtaaggccataaagaattatcttttgtaaatagatttatctagaaaccagtctataatttccttacgattgtctagtttcttcagcagcttactgtattttggttttgtaggttggcctggcagtggtcaatggacagctcatggcagtaggaggttttgatggcacaacatacttgaagaccatagaagtttttgatcctgatgccaatacatggaggtaacttttaagctgtgtagcaaatcacctcactactgatttggaaatcatgggcttgaaatagcctatgaccatcagaactgggatggtcagtacattggagtactttgaagagggctgaagttacacatatttatggctcattttgacttgattgctctaaagtggctgatatattacaaaattctccttttcagtaactgtccagttttataattagagatgggtaaaatagggaaaaaaaatcttcctagtcccatcatgttcagctgaggaaacaaaagcaccgagaaataaaatgacctgcctaagtgagttagtgacagagttagaattagaacctaggtctttggctccaaatctgtccatgccattttttggtgttcttgtgggaaacctatgcctaggagaaacaaattgcaattacttttgaaaaattaatatttgaaaaataatatttcatttttaaagccattttaacttttagggaggaggctacatcttatttaagagagcttaacttaaacttcatttctaggtttaattttactttgcttttaaatcctcaattgtctaataaagctttcttaagtagttaagtagtttttataatttcacataaattaggtgacttttgcatttattttaaatattcaagaacctttacaaacttagcaaaattctcttaaacctttaaacttaaaataattaagtctaaatctttactcaatcatattttatacttgaatcacaagagtaatcttatagatgccctaaaaagccaaattctcttaaacactacaggaacttaaaatgcaaaacacatagtttattctcaaactttaaaaataacaatactatgggtttgatgtatggcatatctgtacttaattctaaatactagtcttctaagaaaacagttttgccttccaagcaatttggggtttccttctcaataaaatgggcttacttgcctaagcaagtatagggttaccatctcagtggttaaggttgcacatcaaccagaaatatcaggctggacatgtgagctgaggcagcagacattctgggaaatttttcttatgaccatgaaggataagctgagctctgttttattgttactattctaaaagaggcagtcttgtagtcctttcttactgtattctaatagtctatctctaggaaagccacaactctcacagagatttaagtgacatgctttggatcctacatatgtctcacagctccatatgactcagtggtcacaaaactaaagtcaggctaataacagcgtgtacgttttgctcctacatcacatttttacagtcctgttcattaagtaaagatttattgatggccaggcacggtggctcatgcctgtaatctcagcactttgggagaccaaggtgggcggatcacctgaggtcaggagttcgagaccagcctggccaacatgatgaaacctcgtctctactaaaaatacaaaaactagccaggcattggggtgggcacctgtaatcccagctacttgggaggctgaggcaggagaatcacttgaacctggggtcagaggttgcagtgagcagagattgggccattgcactgcagcctgggtgacagagcaagactccgtctcaaaaaaaaaaaaagatttactaagtgctccgagccctggggatacaaaactgaacaacaacaacaaaaattcctgccaagcgcacgcctgtaatcccagctactagggaggctgaggcatgagaatctcttgaacccagaaggtggaggttgcagtgagccgagatcacaccactgcactctagcctgagtggaagagcaagactccgtctcaaaacaaaacaaaacaacaaaaaagttccttgccctgctggagctaaccaattgtattgagggagacaaacagtaccataccagtagatggaagtgctgtggcaaatatcaaagcaggggagggggctagggagtacagggaggggaatctgtttttaaaggtgttcagggaaggcctcattggaaaggtagcattttagcaaaacctaaatacggtaaaggataggtaatggcagctttgggcctctcactggcaggatattttcttccatatacagctttctatttttactaggaattttgattaagcataatttctgaagacagccaaatttactgtcacttaatcactataatcttatctgaggacttgtttcttagtaactgtcactaaatagaattagtaatagatgacaaagtaatagtcatgaaattattgaggatcatctgttgaaagattaataactaaatatttgcagttacatatccaagacttaaaaaccaactctacctcatagctgataagggtctagtattcttctccatggaaagtccttaattttgaagatgatcttgtcacaaactagatgctgactttactcaaatctggttttgttctataaaggacttgaagaggcttacagagtacatataagacaaagggataaaaataaataattgaagaattttaggcaaagggaaaacataggtgggacaataatatagccaggggcaaaattttgaaaatgtagaatatataattctgtgtaaccgttagaagtcagtgaggtatacagttgtaaagttctgatgccaaacgtgaatatgatgctctcttattcttcacacagcctcctatgagtgagagcatgtcagtcaatctctgaaacagtcctgctactcaacagtgctcaattgcagcttctaatctttagaatgaagacaatattagtgtgaagctgaaaatattagttgtaatataaaacatagaaacgtgttaataacatcttagtcgtagttaataacatcttagttgtaacatattttccagttagaaaatatgattatgtttctttctttgcaggttatatggcgggatgaattaccgtcggctagggggtggcgtaggagttattaaaatgacacattgtgaatcccatatttggtgaacacagagaagacagtcttgtatatattcctctgtattctggggagctttgaccttggagctttgtacagcttgagaaaacattagaacaaattttattatttgccggtgcctcaacaaatggaaatacaatccaatgaaagtacttcacctgcaagatgcacaataattttcaactctgtgcagaagaatatttatttttggttttaatttatcatggttttttgttgttttcgttttgaacttatccttcctcccacaaaaaaagaaaagaagaaaaaattccaagcagcaaaacttactttgtttgtaaggtattcatttaggtttgaaaatactatttaataagggcagaagggctatatatgatttggctattatttctagacactccatccacatgattccactaacaaggattaccaggaataaaggtaggtatgcaaaatgtattagctacccattattctcgcactaaccaccagaagacttgaaaatcttaaaaaaaaaaaacaaaaaaacaagaaaaggcaacatctcattttaaatagtacaattcagaagggatactaaatcaataaaaaccaggactcagacactacagttttcatcagtgtaattttatgtcttgtttctttctatatgaacttgtttatttagtctttttttcataatattctcatagagtttctgctagatctagagctctgctcagtgcctcttataaaaacaatatataagtctcatatgctgtcttgagaatccaagagaatcacatgcagctctgcaacagtttttgctcaaaaatgttactgactaaagcaactgtccttcctgtttccttattgctaccaaggaccagcagggagaaatgtcttctcccagcagtgaattctgttatgcaatttattcttgatgctcaggcctggttaagctgaggcttacctttaataacagcctccaagggaatgaattattcagttaatgtaatagcacacattaaagagtgtaaaatcaattgaggcattttattaatatcttggttcttttatacaaacaatgtatcattatcttcattctataaggtcattgttactacttctctcaaattgcactttctggtaaaaagttaaaaatttttaaggaaaaaataatttcaatggttaaagttttttttcctcattgtattcatagacaaatttttttcaatatattttgcaagaaaaatctttgaataagactaactgcatttaaaaggaataacctccttctccctttccccaactacaaaaatgtttggcaactttgtgtttacatttaaagatcatttgcacctttttcaaggaaaaaaagtattgagtaaacaattgtttacatatatcatttatgcttttttctagcatgtataacttttttaaataaaggtagtatttaccattaaaaaaattttagctaatgctttttatccttgtacttttgttatttaatttggaatttctgtttctatataatttattttatctgtatgtaaagttacaagtgctttcaacttgaataaaaggattgccagctagaattaataggaattttcattatatatttttatatgttatattacctaacctataaacttattttctaggtaggacttagactcatacaattttgagctggaaggactctttaacaatcatctagtccaaacccacttattacactgatccaagtctgaaaaccacaaagtctgcctaagaataaatagtcaattaatgatagaaccaacattagaaatcagcttcctcaattcccagtccattcctctttctatgccacactgccactataggtttacctgaaactaaatataataaaagaccttaagtattttaattaagtctggtattaacatgtaaaaagtataaaaacttttatgagatcctcactgtagtacatcattaacaatcagtcttcaagacaaaatcatgtatttcccaagactctactacttcatacatctgaggcaaaagagagtgatgatagcattatcactgatagcaagaacaaaactagggattagactctccattagtcaggaagtccccagtgggagcaattcacagggcattgattcaagagtagagacccaggaattaacagcactggccagtcttcattggagcctgttaggggtttgtttttccccctccactgaaggcactccagttttattattgattgaaatgtattgtattaaaggtgttgctgtaaaatagaatgtttattaatttgtgtgcatagttttttccacaactcaagtttggaatgggggttggattggcagtcattttcatttcataaataagtccactgaagcttagaaaagttaaaatgacatggtaggagctgaaccttaaatctatagcccctgattgtaaatcctttgtgctctatacacattcccccattcctgtttttgattgcttcccagctttgttccatgttttacctccagatattcacactgcagataatacttcttgaccactgtgtaaaaggggtctttcctgaacaagatgtgacggagtaggggacgaacctttcaaactttatgttaactgaggaaacagatgggcaaagaaaaaaatgcaagaaggaaagaaatacagaagaggagagaaagaagcagcaggaggcaaaaatgacccactaaacctgagtatgtctgcccaattgtgagaaatggctctgtaaattgctttgagggccctgctggaaatgactgaaaagaatggtcccaagaaatgacaaaactcttcaactaagttgtcttacatgtccttaatattgatctttcaattatttagctgtgtaaggttaggaacttagattattttaaatgtaaaaaagaaaggatggttattcactgaactatcataaaatatttgggattattccaataacagtaacctactaatacccctatcctagaaagactgtttaagcctgaattcctaggaaaaaaggacacatatcttcagggtgaatttagatcagtgaacccttggacttctaaacaggaacagcccctgctttcaaaaagcttagttttaagcctttttcatcaagcctctgtatgagtggttctcaaagtatggtctgtggacccctgaggtctccagtatctttctttctttcttttttctttttttttttttttttgagacggagtttcgctcttgttgcccaggcttgcgtgcaatggtgcgatctcggctcaccgcaacctccgcctcccagattcaagcgattctcctgcctcagcctcccgagtagctgggattacaggcatgtgccaccaggcccagctaatttttttgtatttttagtagagacggggtttcgccatgttggtcaggctggtctcaaactccagacctcaggtgatccgcccgccctcgcctcccaagtgctgggattacaggcgtgagccactgcaccgcacccagccaagtccccaatatctttctaagtatccatgagtcgaaactattttttttttttctttgagacattgtctccctctgtcgcctaggctggagcgcagtggcgcgatctcggctcactgcaagctccgcctcctgggttcaggccattctcctgcctcagcctccccagtagctgggactactagcgcctgccaccacgcccggctaatttttttttttttatttttagtagagacggggtttcaccgtgttagccaggatggtctcgatctcctgacctcgtgatctgcccgccttggcctcccaaagtgctgggattacaggcgtgagccaccgcgcccggctgaaactattttcttagtaaaactaagttttctgccttttatactgtagtagcatttgtgctaatggtgcaaaagctatggtgggtaatactgccggtgtcttagcataaatcaaggcataaatcaaagcataaatcaaattgtacaactagacatagtattcaccaccatagacttgcaggactttttgttgttgttgttgtttttacatgtttttgtttttgagacagagtctcgctctgtcacccaggctggagtgcagtggtgagatctctgctcactgcagcctccacctcctgggttcaggcgattctccaacctcagcctcccaagtagctgggaatacaggcgcccactagcacccccggctaatttttttatttttcatagagacgaggttttgccatgctggccaggcttgtctggaactcctaacctcaagtgatacgcccaccttggcctcccaaagtgctgggattacaggcatgagccaccgtgcctggcctggagttttgtaaatttgcttaagcatgcccttgatgaagcaacaaaaattattagtttactaaatctcaacctgtggacatatgtctttttcaatattttatgacaaaatgggaagtatacataaaacactgctgcaaaccaaaatacagtggtcatcccaagaaaatcttctgagattgttttaagatgcaagctgaactacctactttttgaaagaatgatggacacagaaattaaggtcattcagactggggtgttgagcagacattttctctcaaatgaacaaaatgaggctaccatttcaaggaacacaaccgacagtacttattgtcaaccatattcaagagaaaaattacaattttgagaaagctgtgtcgactatgaacttgacagctacttaaaaacttttatgatgaaattgctgatgacattgatgaatgcctttttaattgtatagtgaagtgtgtcaacatgtggaagatctgcataattcatggaatcagtttttctaaatgattaatgcacaggttaagatgtatccaaagcagaagatagaccaacagatctaatgggaacaatatgaaaggtctattgatatggttttagatttcagcagtcacttgtcaagttttgatgtaatatcaagaagaatatccataattatcagaaaagctattaaaatcctcctcccccttccaatttcatatttgtgtaagccatattttcttgacatacttcaaccaaaataacattgcaaaagattgaatgcagaagcaggtaagaactcaattgccttctaatatagccagatattgaagaatcatacaaaaatgtaatttttttgcttttgaaataaaaaaatttgttttaaaaatgatagtctgggccaggcacggtggctgatgtctgtaatcccagcaccttgggaggccaaggtgggcagatgtacttgaggtcaggagtttgagaccagcctggccaaaatggcaaaaccctgtctctactaaatatacaaaaattagctgggcgtggtggtgcacgcctgttagctccttgggaagctgaggcagaagaatcccttgaacctgggacacggaggctgcagtgagacgaaatcatgccactgcactccaacctgggtgacagagtgagactcagtctcaaaaaaaaaaaaaaagcacataaataggtttatttttgatgcactaatttttttaaatttctcaattttaatttctaatatggtaaatcactagatgtaatgcatgtaaacagaagctctttgtgtcctcaagtttttgagactttaaagggatctcaaggcaaaaatgtttgagaactgctgctctaaatcttccagtttacaggaaatacaaaggaacagaggaatgtgttaacttcatagcaattcaatgagcagagttcaaaagtgcgaaactttacaagacaaataactttgcttctccaaaaattgaattgcaaggaaagaaagtggagagggagaaactgacagagtaaaaggaatttaagactcatatcatcagcctagagcggtggctcatacctattaataaaatcccccagcactttgagagggcaaggcgggagaatcgctttaacccaggaattcaagaccaatttaggcaaataagagagaccgtctttacaaaaaactacatatatatataaaatttatatatataaaatataaaatgtatatactatataattatatattaaaattatatattatatataaattatgttatatataaattttaattatatatatatatatataaaagctgggtgtgttggcacatgcctctggtcccagatacttgggagattgaggtgggaggattacttgggccagtgcatgatcacaccactgcactacagcctcattgacagagcaagaccctgtctcgaaaaaagccagccagatatgagggcgatctgactgtgacatctgtcactctattgatcgccagggttgattcggctgatctggctagctaggcaggagtccccttcctccctcaccactccatgtgcttccctcttgaagctgtgcacactcagtggaagaggacagccatccccaatagaggaaggccagtctgcagtcaagggtatacaagtagctgcattcccctactagaacctccaaacaagctctcaaggttcatttgtaagagaacgtagggttctttgaagtcaagcttccaagactccagacacatccaagtgagttgctgcatgtggcagtctgcctttctttaaaacaaacaaacaaaaccaccaaacttcaggtaataaggcaggtaatgttttacataatgcatctcagtataaaacatgcaacaattgaattatttacatagcccagcagaagcgattcaatagtctgccctgatgtggactgtaagaatgattagaaaagaagttaagcctgagaaaggtttgaaagagagtaatagttttgctaagtggacaagagtggaaaggacattccaggcagagcagcatgtgtaagatatacagaaggaaggcagtgagacagcatgggctgttcagggaaatcaaagcagtctgctttcaggagaataaagtaaaaaaagcctgtgtccagaaataagacaggagaaccaggtatcatcataagggcctcatatcccagtacttttctctcagctttcttttctgatgttaattctagtaagttctgtgagggtgtacacggtcaggctctaagaggcccccagtgatccctgcattctggtattcacacccttgtgtaatcctctcccaaaatgcaccagggttggtctggtctgtgtgcctaatagcgatgctaggaactctggtggggaatgttgataatgggtgaggctatgcatttgtagagaaaaagggtatatgggaaatctctgtaaacatccactgaattttgttgtgaacctaaaactgctctaaaaaataaactctattaaaaagtataggggggtggtatgtcacttccaaaattaggcttaaaaagaatctagcttttgtcttgagtgtttttctctcatctttcacactctgggaaatgcaaatacataaaagaatataagaaacccatgaacctccatataccaaccatccagcttcaaaaattaacagattttgtaaattttgttttatctgtctcctcccactcttacttctcctctccatcaccactgaagtattttaaagcagatcccagccatcaccttaaagtcatgcacttcattcataacaacgttttggtcattgacagaccacatatatgacagtggtctcataagattataatactgtgtttttacagtgccttttctatgtttagatatgtttagatacacaaatccttaccattgtgttgcctacagtattcagtacagtaagtaatacattgtacaagtttgtagcctaggagcaacaggctatcccatatagcctaggtatatggtaggctataccatctagatttatgtaagtacactccgtgatgtttatacaaagatgaaatcacctaaagacatatttctcagaacatacccctgtcgttaagtgatgcatgactgtatttcacccacatttgagtatttaacagataaggtctaactataacaacattatcacacttgataaaataaacattccttaatatcatctaatacccaatcaatgttaaaattcccctagttaccacttaatttgtttactattatactttgaagttttctttttttcctgtcccttcttttgctcacttggtcaaatttctatttcgttcctttgccctttaattttagaaattcttctatagtttctattctatttggtgtgtgtatctgcactgcaacagatatagttaaacgtatttctctacgaagatactcacattaagaggctgttatccatcctggctaccacggtgaaaccccgtctctactaaaaatacaaaaaaaaaaaattagccggacatagtggcgggcgcctgtagtcccagctactcaggaggctgaggcaggagaatggcgtgaatccaggaggtagagctcgcagtgagccaagatcacgccactgcactccagcctgggcgacagaggaagactccgtctcaaaaaaaaaaaaaaaaaaaaagaggctgttagaaatacttcataggtgctctatagcacccagtcataacatacgtgatacctagacagcccgtgtttagagatactaacagtgggtagtggcctcgggtgttatcagctagctccattataaaatactccatcaatctttcacctaagggtttaagcagatactaatgattgatgcttacatctattatttcactgagagttataaatgatgccttctcattcctttgcatttatcagctgaaatatatctaaaaaacttaccttgatcagctatttgattatcttgaaatataatttatactagaaagtagaaaatgtttgcttctcccctttaccaattttcagaacttgattctgcagcaacctccaaaagtaacaccaatttctaaaattttgtttagtattagtatgagctcataaattatttttactttaatattgatataaataaatttttatatattcaatcaattacactttttccttttgatatgtgaattgtctcacctttggcaagtagggtcccccttcattttggctcctagccttttgacacaactgttgatagctatcttgcttttctgatatatgaaaggttatttttatacatttcttgtcccaaacctgaaatcagcccttcctcaagaagttttagctccttttagtgggaaatacttatagaacataatctgtgtgttagtaatgttcattgttaatggctttttactgcttccgggcctctccagtaaacaaagctatgtgttttttagcaaatcatgaataacctcagtagatgccgaaaaaaaattttgacaaagtgcaacacctattcataataaaacccctcaacaaactaggaatagaaaggatcattcttaacttgataaatgacatctatgaaaaaacctacagccaacatcatatttaattgtaaaagacatgatgctttcctactaaaaacaagacgaaaatgtatattcttaccagttctattcaccattgtactggagattctagccaaggcaattcagcaagaaaaagaaacaaaagattaaaaattaagaaataaaactgtctttattcacagatgatatgaattttttatgtagaaaatcctaaagaattcagtgaaaaaaaactactaaaataagctcagcaaagtcacaggatacaagagcaatatacaaaatcacttgtatttctatatgctagcaacaaacaatttgaaaatgaaattaagaaaacaattccattctcaatagatctaaaataataaaatatttaaagattaaataaatggaaaaacatcctgctcatagattagaagatttactatcattatggcaacactccccaaactgccctatgaattcaacacaatcattatcaaaatcccaggaagttttttttttttttggcaacaattgacaagctgatcctaaaattcttatggaaatacaaaagacgcagccaaataaccttgggaaaaaaacaaagttgaaggtctcacacttcctgatttcaaaactcactacaaagctatagtaattgagacagtgtcgtactggcataagaagtgacaagtagatcaatgaaatagaaagtccagaaataaacccaaacatccatgaaatactgatttttgaaaaaaagtgacaagacacttcaataggaaaaaaagtctgttcaacaagtggtgctgaagcaaatgaatatccatgtgcaaaaggatgaatttggacccctacctcacaccatacacaaaatttaactcaaaatgacagacctaattttctaattagaaaatcctgagaagaaaacaaaagtaaacctttaggacctgaggttaatcaatgatttattagattcaacaccaaaagtacaagcaataaaagaacaaaaattggtcagacttaatgaaaatttaaaacttttgcactttaaaaataagagttaattctgatattcccaattaaatgtaatattagagtttttacttacttgattttataattgtgtatcttttacactgatgatctctctttttttttttaatgtcacccaggctggaatgcagtggcacaatcttggttcactgcaatctccacctcccaggctcaagtgatcctcccaccccagcctcctgagtagatggcactacaggcatgtgccaccatgcctggctaattttttgtatttttatagagacagggtttcaccatgttgcccaggctggtctcgaacttccaacctcagatgatccacccacctcggcctcccaaagtgctggaattacaggcatgagccaccatgcccagcctacactgaaaatctgaattcttacacacgttaccatattataaataggccgaaataataatagctacattattaagacaactgaatgtgatttaaaatttatttgctgctcttctttttctaggatggagcctgctagaatatacaaccaaaataccacaaatttaaagatactaaaaatttaaagatacacaaatttaatgatactccaggctgggtgcagtggctcctgcctgcaatcccagcactttgggaggccaagaggggaggatcacttgagcccaggagttcaagactagcctgggcaacacagcaagaccccaactctaaaaaaaaaaaaattatcaaaaaaaagaaaaaaggccagacatggtgttacacacctgtagtccagctactcaggaagctggggcaagaagaccactttagcccaagagtttgagcccagcctaagcaacacagcaagatcccatctctaaaataaaaatataaaggccaagtgtggtggctcacgtccataatcctagcatttggggaggccaaggcaggaggattgtttgagcctcggctcaggtgggaagggttaaagaccagcctgggcaatatactgaaaccccatctctaccaaaaatacaaaaaattagctgggcattattgcatgcacctgtagtccgagctacttgggaggctgaggagggaggatggtttgagcccaggaggcagaggctacagtgagctgagatcatgccactgcactccagcctgggcaacagagccagaccctgtctcaaaataaaataaaagtaaattaaattaaaatagatactgaaaaaaatttgtgtgggctgggaacagtggctcatgcctgtaataccagcactttgggaggccaatgcaggaggatcgcttgagcccaggagaacagcttgaacaacatagggagacctcatctctacaaaaattaaaaaattagccaggcttggtggcaatatgcctgtggtctcagctacttggaaggctgagtttggaggattgtttgggccagggaggtcaaggctgcagtgaactgtgattgtgccactgcactctagcctggacaacagagcaagaccgtgtctcaaaaaagaataaaaaaacttgtgtgattatgccatgaacttaatacagttaggctcatttttttttaattgctaaggattgctttgttttttccttttgttctaattttctttcataattatacaaaacacttacatggttctaaactattaaaaaggaacattcaggtaaatcttaactttcattcctgtcccctctactctgttccttccttctccctataagtaaatacagttataagtttgtggtttatcctttcattgttttttgaaagcataaggaaatacactcatatctccctcattccttacataaaaagtacaatactctacattctgtccacatacattgctctttcacataacagtacatcttggagatcactccatgggagtaaagagatatcttccccaatcctttttatagctgcatagtagtaattcattttgcagctataccaggcctgatgagcatctgagttgtttttagtcttgctattacaaatactattgtaataagtaaccttgtacatgcttcatttcatatttttttgccagtgaatttttgggacagaatcctagaagtggaattgctaatcaaagggtgactgcacacatagttttgtttaatattgctaacttcttctccattagggttttatcatttgcaataaccttttaactgtttcccttcttccactcttgtctacctacacccattctccctcatatcttataaaatcctataaaatactaattgaatcatattactctcttacttaaaatctttcagtggcttcccattgcatttagaataaaatccaatctcttcacactataaaaacttagatgatagagctcctgcctctgtatcaagttaggattaagtttgactatgagcaagaaagacccaaaatgacaacagctaaaacaagagagaagtttacttctctgacaagtaagtctagaggaagactgcccaaggctggcactggagttcaccttcaagaaaacctcagggcacaagctcctcccaggccatgctctgtcatccctaggacttgttcctcaaccccaagacctaagagaatagctatagtactagtcataatatcaatgttccaggcagcaaagttggaagaagggaaaagtaagaaaagggggaaggggtacatgccagttgttttttattataggtaagatttctggaagctctatatgacacttcaatttgtatcccaaatcagaacatattcatatgactatacctacctacgaggaaggctggaaaatatcatctttattctgggcagccaggtgccctagccaaaaattgggacattttatgccatggaagaagtctttgctgcacaacctattcagtttcagctcataataggccatacacccttattcactatgctctagccaaaaaacttcctttgttcttcaaagcagccaaactcttacctatctcaaggtttctcctgcctagcacacccttcctcagatcttcacatggctggttccaactcatcattcaggactcagttcaaaaggtcacttcctcagacagaccttctttgactactgtatgaaaggtaggccccaccccagtcaccctttttcatattgcactgccttattttcttcatagcatttgtctccatctgaaattattaaccttttgccttatttcactaaaatataatttcctcagaacaaagaccttttttcacttcttcactgctatattcctattatgcagtacaattctaagcacatggtaggagtttaagattagttgaatggatgaatgtctgactccaaagcccatgcttttcccattacatctactgctcctagtacatctgaaataatatcccattccagtagtcaatctttgtttttttgagaatgacagcctaataattttctttcaatcaagatttttaaaaaattattcctaaagtaaaagaaaatcttatgctcagtaagtaaaaagaagagatttggataaaacatcatgggcaagactcttaagttcctcgatctcacagttttcatctgtaaaaagaaagagttgattaaaattgatttaatctatagatatttaccaagcattatgctaaactgggacatgaaggttaaataagataatttctgacctcaaaaggggctcacaggtgcctttcaactctacaatttgtaagattctatataattgttagtctgtaccctctgtgttaacagaaaaagcctaccaatttccactactgagatattaattaaaagatgtcgagacattgataaacacattgcttcattttaaaataaacatttaattcaacattgcaacaggagttgaactgtatttaaaacagaagcatattaatgactaaaaaaatgtgtatattaatctttagttcccttttgaggggattttgattgccagttctccgcagtgaaatgctaggaaaatgtctttagaagacagaattctttctgaatgcaagtctaaaatgcttaaaagagattaaaggttttaaagacccaaatcagaaatatccattagatacatctcatttgaatcctaagagtttaaacataataaacgctgtatttatttattttatttcttttttattttttgaggcagagtctcactttgttgcccaggctggagtgcagtggtgcagtcttggctcactgcagcctgtcttctgggttaaaacgattctcctgcctcagcctccccagtagctgggatcataggcatgtgccaccacgcccagctaattattgtattttcagtagagaaggggtttcaccatgttggccaggctggtcttgaattcctggcctcaaatgatccacccacctcagcctcccaaagtgctggaattacaggtgtgagccaccaagcccagcctatatatatatatttaaagatgacaagaaattaacaactcagcattttgagaatggcatgtcaggttatcatgattagtacatgggcacctggctgtggctcatctactaccatattctttgttcttctagatccttcttggcttccatcttggcaactccaaaggcatggtggggaaaacagatgcagagatagatgcctatttctcctgcagtctctttcagcatagcaattaggcaagttatcaataagagtatataatctataacttatagtccacataaggcttcactcaatttgaaaaattgccagttctgtcaaatatgctaacactccaataaggtatttatgacacagaatctgcaaaaagaaaaagaaggagacatttaaaattagaatagtattaattataacaaagcagattgatatttgaataatcaatgttatattggtttaacttctagatttaattcatgaagcttaccacatgcaatacactcatttttggccaggcacagtgatttatccctataatcccagcactttgagaggccgaggcaggaggatcacttgagcccagcagttcaagaccagcctgggcaacaaagggagacctcatctctacaaaaaaattttaaaatgtaaaaaacagccaggtgtaatggtatacacctatagtcccagctactcacaaggctgaggcaggaggatcacttgagcccaagagttaaaggttatagtgagctataatcacactactgcattccagcctgggtgaaagaatgagactctctctaaaacaaaaaacccctcatttttacattttctatttctttccctttttgttttttaatgctggtctcatcaaaattatttcccaacctactgttgcactgtgacctccagtttgaaaaacatgaatatagtgcttatagagtattgacttattggatctacgaggtaagagttcaaatcttgattcttcctcttgataatctatcttgcttgtcatttaaacctatcttggcctcagtttccttgttttaaaataaaatgtggataaaaacacctaactgtccaggcacggtggctcatgcctataatcccagcactttgggaggccgaggtgggtggatcactaggtcaggagtttgagaccagcctggccaacatggtgaaaccccatctctactaaaaatacaaaaattagccaagtatggtggtggagcctgtaatcccagctactcgggaggctgaggcaggagaattgcttgaacccaggaggcggaggctgcagtaagccaagatcacaccactgcacaccagtctaggcaacaaaacaagactccatctcgaaggaaaaaaaaaaaaatctaactagccaggcatggtggctcatgcctgtaatcccaacactttaggagccaaggcaagtggatcatttgaggtcaggagttcaagaccagcctggccaacatggtgaaacctcatctctactaaaaatacaaaaatagctgggcatggtggcaggcacctgtagtcccagctactcgggagactgaggcaggagaatcacttaaacccaggaggcggaagttgcagtgagttgagattgcaccactgcaccccagcctgggtgacagagtaagactccgtctcaaaataaataaataaataaagataaaaatagtaaaaaaagtaaaattacaaaaattagccaggtgtagtggctcatgcttgtagtcccagctactcaggaggctgaggcacgagaatcgcttgagcctaggaggcagaggttgtagttagctgagatagcaccactgcactccagcctgggtgatggggtgagattctgtctcaaaaaaaaaaacaaaaagcacacacagaaaaaacacctaactacagggttgctctaaagattagaatttaagtctgttaaactcttagcacagtaacaagatcacaggaaacatttactgaatgtacattgtggctgtgtattttaatatattttaggagccaattctcagtttatttctgatactttttttttttcttttgagacggagtctcgctctgtcacccaggctggagtgcagtggcgcgatctcggctcactacaagctccgcctctcgggttcacaccattctcctgcctcagcctcccccagtagctgggactacagatgcccaccaccacgcctggctaattttttgtatttttagtggagacggggtttcaccgtgttagccagcatggtctcaatctcctgacctcatgatccgcccgcctcggcctcccaaagtgctgggattacaggcgtgagccaccatgcctggcctatttctgatacttcttatcagaaatcactctgtagagaataaaacaatgtctctattatttctttcccaatgaggacagaaaagcctggaacataaagatgacatcttagttctgtgtttctggctataattttgtctaacacaaaattctctattactctgataattatttcaaaatttcacaaggaacaattctgaaagtttcaaagttactacaaaataataattcacattattaccaaaagctgaagcacacagcatatagtgtccttccattataaggctatatctagaaggctaaagactgcaataaaccataaaccataaaataaaagctctctattgtcttgaatacattcaagtgtgtttcttcaattgagtggacaatacaatcatcatacatttttaaaaccataaaacaaggaaaaattacttaactagattgttcaaactaacctttatttttccatcagtatgtgctgaagctacagatgttgaaacacgaactaatcttgtggctgataaatgaattttgaaatgtctatggaaatgtgaataaaggcaatccatgaataggtcaacttcttcctgggtaacctccccaggtgttttgtggacactgtcccatagagcttttgcatcctctggatgtattgcgaaagaaatgtccagactttgagggctacagggtacagaccaaagaaattcagtagtagccacataatggtccattttgcatgcagtccacatggcagccatccaggaaagattaaatgcattgattgctaaaggactgaaataacagtcaaaggttttctgaaaccaagttccaattattgctgtgttagactctgctccatttgcaaggaataagggcagacaggtgaaatcttctgaaacagtctccagaagactgtctccaaatacacagcagaaccagccagtccacagcactttacccctttctttttccccctattctcagatggcaattgagattttgacacaatctacaaagaaagtaaacaggctccttaaattcaaaagtacatttacttctaaattccatcttctcaaaattagttcattaaaaataagacgagccaatgtaatacttgcaaaaaaaaacatagagggaatagtctccctaatgattaacagggcttatcaaaataattggccttttttttttttgagatggagtctcactctgtcgcccaggctggagtgcggtggcgtgatctcagctcactgcaacctccacctcctgggttcaagtgattctccggcctcagcctcccaagtagctgggattacaggcatgcaccaccatgcccagctaatttttgtatttttagtagggatggggtttcactgtattggtcaggctggtctccaacctctgacctcaggtgatctgcccacctcggccacccaaagtactaggattataggcgtgagctaccaggcccggcccccaatattcttatacagtggaaacatgatatatggcaaaatcttggtgtaaccaaactgcaaaataagagctaccaatatggcataaccaggtgtagtaccctgaaacaaacaaacaaaaaaaacccctcaactttagaaagaactgtgaaaggtcacaaaatctaacatgtttgaattctttcattgaggaaggcttcaatatttcctaaggcagcactatcaacttaaaatgttcttttatatgttagaccctacagtttctacccactggtcctgctttcttccttttgggcatgcagaatataatcacatctgatctctcttctacaggaaaagtccttcaaatatttgatggtccccatcatacatagtactaagttcaatatttccagtttcttcaaccattcacctatgacatacattcacattctctcactattctagtcactcttccctgaaattattctgcataggaatcattcataagtgaatataattactttaaaaagctctgattcggggaaggaagggggaaaaaggtctcattgcaagactaaccaccacctttaactagattatactcctattaatgtaatctcagattgcagttttctggtttttagttgacagctttatataaactagccctgtatattcatgtttgctttataggtaaatctctcccaacttatactgaggctgtaaatttattcctactaacattttaatctcttttgatttggctcattggacaatccattcagaacatttaggatattttattatatttttagctgattgcctaacccctcaaactaaattttaagttacatgacaaacatgccttccggatactcaaagaactctgttaaagcattaagcagaccaaggttaatatcatagctttgtatcataccccttcagaaatgatcatttacacagttcttttaacatatttctccttgttcaagaaattatgaaagactctcaaatagctggaagcttagatatattaactttatcacactttcatgacctaagagtcttgtaaccctatcaagaaacgaaatttaatttgaaaactattagaacactataccaggaattcaagaggtcatttctaatcctcacaagggtagatgcttgactgataatatgcaagtcacaaaacttctctgtgcatcaagtgcttcacttgacaaaaactgctaattgtctcttgagtatccatttttcctcccacaataaaacagtccctttatggctgggcgagatggctcatgcctgcaatctcaggactttgggaggccaatgcgggtggatcacgagctcaggagtttgagaccagcctgggcaacacggtgaaaccctgtctctataaaaatataaaactagcctggcacggtggcacatgcctatagtcctagctacttggggggctgaggagggaggactacttgaacccaggaggtagaggttgcagtgagccaagacagtaccactgcactccaacctggtgacagagaagctgtctcaaaaaaaaaaaaaaaaagtctctttagttaagttggcagagtactcactgaaaaaaaagtcttttctagcctcccttccaactaagatgtaaagagaagttactgggtctcagcaagatttactctgcatcaggttctgtttgtccttcccatcttcttcctacttcctgcctggaacttgaatataatgtttagagctgctggagacatcttatgttagacaataaggtaacttctaagatgaaaaccatgcactaaggagaagaaagagcctagattattaatgatttcatcaagcatcataccagcctcggacagcttacatccatgcactttttttttaaaaaaagacagtataccactatcttgtttaattcactgttatttaggctaaccctaatcccagaacatcttgagatctttgccaataccatgacctatatcaggggtcagcaaattttttctgtaaagggccagttagtaagcatttcagactttgctggcaatatgggctctgttgcaacttctcaactctgctgttgcagcacaaaagcagccacagacaatatataagcaaataaaaggggctatgttccaataaaaccttatttacaaaaacaagcagcagatcagatttggcctatgggccatggtttactgactctaatctatacaaacaaaaagtcagtccttttcaactgcttgagaacttaatttccttatccattattaagattagttagctcaaaagaaacagaagcagcaggcatgaataataaacaaaataaatctgaggctgagtgtggtggttcatgcctgtaatcccagcactttgggaggccaaggtgggtggatcacttgagcccaggagttcaagaccaacctgggcaacatggcgagaccctgtctacaaaaaatacaaaatttacccgagtgtggtggcatgcacctgcagtcccagctacttggaaggctaaggtggaaggatcacttgagcccaggagacagaggttgcagtcaaccaagatcgtgccactgtactccagcctgggtgacaaaatgagaccctgtctcaaaaaaataaaataaaataaaataaacgcaacattttatattccttcctgtaagtagtatataagagcaacagaactatcttaagaaaccagatttatttatttatttattgtattttttgtagaaatggcatcttgtcatgttgcccaggatggtctcaaactcctaggctcaggtgatctgcccgccgtagcctcccaaagtgctgggattacaggcatgagccactgcacccagccttaaaatgttacatttctgagagtaacctggcatgaagtatcacaaaatttaatgatatatatttttatactaaaattctacttatagaaatttaatcccagtaaaaaccacaaaaatacagaattcctaatgatataagtaattgtctacaatattagtaaaaatatcataatgtaaaagtatgggcaatatgatcccaatttcaagactatatagatacagataaccaaacatatataccaaaatgttaaactataatttttaacttttttggtatttttatgtatttcctcagtttttaaaaataaacatgattttgtacacaaactacctatatatataggaaaaaattttttaagttgattatatctaattattatagtttagtcaaacaagacataatacttttcccctaggaagcaagaactgtttatgtattatacctggacaagaaatgcttccgggtccctttgtgttcctttcattcctaggagagtagaaaaaatcactttgatgttgaagtcttctcccacttccacagcaagtcctttttgcttttcagcaacaataaaagcattgagaagtctagaatactctttgagattactataggagaatttatataagggagttaaactatataaagtccactgtttatgcagaaggaatgcaaccttttgagggtcaacatcttcctataaaaaaaaatcaagacaaaagaagtttaagaattaggaaacaataagaatttaatcatagcatttaaaacatctaatacaaatatattattgagtacctgatttttgcactccaaccaaatgagtttgcaggactttttgcagatccttgaacagacctttacctttgctgtaccttctctttagaatgctcttctcccaagtgttcacatggcaagttccttcacttcatcagttctctacccaaatgtaatccaagaggccactcgatctaaagtagcacctgcacccactccaactttgtatcacctcatctggctttacttttcttcacagcacttattactacccaacattatattcttgtctgcaatttttttgtatttttattatctgtcttccctactggtgtataagctggatgacagcagtgattttgtctatttagttctctctagaacaatgctatctagaataagtgttcaataaatatttaacataaaatttatgtttcacttttagaaacctcaaactatagatttcaaaagtagtaaccattcctaaagtatctaatttgattagtcttaatttaaaaaattgtttgggccaggcacagtggctgacgactgtaatcccagcactttgggaggctgaggcaggcggatcacaaggtcaggagtttgagaccagcctagccaacatggtaaaaccccatctctactaaaaatacaaaaataaataagccaggcatggtggtgtgcacctgtaatcccagctactcaggaggctgaggcaggaaaattgcttgaatctggaaggcagaggttgcagtgagccgagatcacgccactgcactccagcctgggtggcagagcgagactctgccttaaaaaaaaaaaaaattggcagcaaatctactttatgaaaccatgcccaattcaatagattaaataaaaagatacttgggggctggtccaaaggtagtgagttatctcagttgattgttcacaatcagttatagatcaaactccttgtttccaactccctgttctactctttcccccttccccctttgtcactactgtgctagactagtcttaaaaaaaaaaaaaaaaagatatttgggaatattttttgccatgctctattagaaccacaggtacgattaaaaacaaaaacacttcatttataccatatactatatataaaaattaactcaaggtggattaaagacttaaatgtaaaacacaaaactataaaaaccctggacgacaacctaggcaataccattcaggacataggtacaggcaaagatttcatgacaaagacgccaaaagcaattgcaatgaaagcaaaaattaacaaatgggatctaattaaactaaagggcttctgcacagcaaaagaaactatcaacagagtaaacagaaaacctacagaatgggagaaaatttttgcaaaccatgcatctgacaaaggtctactatccagcaccaataaggaacttaaacaaatttacaagaaaaaaaatgggccaggtcaggcgtggtggctcacacctgtaatcccaacactttgggaggccgaggcgggtggatcacctgaggtcaggagttcgagaccagcctggccaacatggtgaaacccggtctctactaacaatacaaaaaaattagctgggcgtggtggcgggcacctgtagtgccagctactccggaggctgaggcaggagaatcgcttgaacccaggaggcggaggttgcagtgagccaagatcgtaccattgcactccagcctgggtgatagagcaagactcccagcactttgagagggtggggagggttgatcacctgaggtcaagagttccagaccagcctggacaacagggtgaaccactgtctctactaaaaatacaaaaaaaattagccaggcatggtggtggatgcctgtaatcccagctactcaggaggctgaggcagaagaatcgcttgaatctggaaggcagaagttgcagttagccaagatcatgccactgcactccagcctggctgggtgacagagtgagacactctctaaaaaaaaaaaacaaaacaacaacaaaaaaaaaacaaccccattaaaaagtcagcaaaggacataagcagacacttctcaaaagaagacatacatgaggccaacaatcatatgaagaaaagttcaacatcactgatcattagagaaatgcaaatcaaaaccacaatgagatgctatctcacatcagtcagaatggctattattacaaagtaaaaaaacaacagatgctggtgaggttgtggagaaaaataaaaagtcaaaaaaaaacagatgctggtgaggttgtggagaaaaaggaatgcttatacattgttggtaggagtgtgaattagttcaaccattgtggaagactgtgtggcaattcctcaaagacctagagacagaaatattatttgacacaccaatctccttactgggtatatacccaaaggaatataaatcagtctaccataaagacacatgcatgcatacactcactgcagcactattcacaatagcaaagacatggaatcaacctaaatgcccatcaatgacagactggataaagaaaatgtggtacatatacaccatggaatattatgcagccataaaaatgaatgagatcatatcctttgcagggacatggatggagctggaggccattatccttagccaacaagcaaaggaacagaaaaccaaataccacatgttctcacttataagtgggagctaaatgatgagaacacatggaaacatagaggggaacaacacacgcttaggcctgtcgggggtggagggtgggaggaaggagagaagcaggaaaaataactaatggatattaggcttaacatctgggtgatgaaataatctgtacaaccaacccccatgacgcacgtttacctagaaaacaaacctgcacatcctgcacatataccccttaacttaaaataaaagttaaaaaaaaaataccgtggacatgattcagattaaaggaggttaaaatacataaaaactcctcgtatatatgggttgcatgtttgaaaattactttaaaaataaataaacaggccgggcgcggtgactcatgcctgtaatcccaacacttggggaggctgaggcgggcagatcacaaggtcaggagatcgagaccatcctggctaacatggtgaaaccccgtctctactaaaaaatacaaaagattagctgggcatggtagcgggcgcctgtagtcccagctactggggaggctgaggcaggagaatggccgccaggaggcagagcttgcagtgagccaagatcgcgccactgcactccagcctaggtgacagagcaagactctgtctcaaaataaataaataaatacataaatacaaatataaaaaacaaataaaagacataaagaggtagcactgatcgttatgaaattgtttctttctcatttattttattagctgaggggttaagaagatactaagaatactatagttacaaaaattgaaatgttttgttcacagatattctcaattattgactaacacaaagggacacaaaaagcatacctgcaactgcgaacactggggaattttccttcgaggtggagtcaggataaatgaactctgcttcctgaccgattctaatcgtttctgcagaggagtggcacctataaagtaatcttcaggtcttgaggatgcactaggagttgactctggtgcactgtaagaatccatggtctgtctgcataagaagaaacaaaaccagaattctaagcactaaaaagttaattcatgcttacagtttcactgattcctcactctaaaggaatcctttctctttctgtcttttcccctccctatccccagttttgacttttaaaccaagtcctatattcctcattggctatagcccacttttatgtatatcttacagatacctcaaaaacagtatatgttcaaaactaaattcaacttcttttcctccttcaaaaagctaactgatccattttcaaattcctgtcaatttgctaagttaacttaaattcatgtagtcccccaccttcattctttaacacatagtcattaagcacattctactgaatttttctgtcaagaatctgtctaatccagttccaagatggctgaataggaacagctccggtctgcagctcccagcatgatcgatgcagaagacaggtgatttctgcatttccaactgaggtaactggttcatctcactgggactggctggacagtgggtgcagcccatggagggtgagccaaaacagggtggggcattgccccacctgggaagcgcaaggggtccagggatttccctttcctagccaagggaagccatgacagactgtacctgggaaaatgggacactcccacccaaatattgcacttttccatatggccctggcaaccggcagactaggagattctctcccgtgcctggcttggtgggtcccacacccatagagccttgctcactgctagcccagcagcctgagattgacctgcgagacagcagcctcgtggtggggaggggcgtccgccattgctgaggcttgagtaggtaaacaaagtggccatgaagctcaaactgggcgaagcccaccacagctcagcaaggcctactgcctctatagactccacctctgtgggcagggcatagctgaacaaaaggcagcagaaacgtctgcagacttaaacatccctgtctgacagctctgaagagagcagtggttctcccagcatggcatttgagcactaagaacagacagactgcctcctcaagtgggtccctgacccccgtgtagcctaattgggagacacctcccagtaggggccgactgacacctcacacaggcaggtgccactatgggacgaagcttccagaggaaggatcaggcagcaatgtttgctgttctgcagcctctgctggtgatacccaggcaaacagagtctggagtggacctccagcaaactccaacagacctgtagtctagggacctgactgacagaaggaaaactaacaaacagaaaggaatagcatcaacatcaacaaaaaggacatccacaccaaaaccccatctgtaggtcaccaacatcaaacaccaaaggtagataaaaccacaaaaatggggagaaaccagagcagaaaagctgataattctaaaaaccagagggcctcttctccaaaggatcacagcccctcgccagcaacggaacaaagctggatggagaatggctttgatgagttgacagaagtaggcttcagaaggtcggtaataacaaacttctcagagctaaaggagcatgttgtaacccatcgcaaggaagctaaaaatcttgaaaaaaggttagatgaatggctaactagaataaacagtgtagagaagaacttaaatgacctgatggagctgaaaaccatggcacaagaacttcatgatgcatgcacaagcttcaatagccaattcaatcaagtggaagaaaggatatcagtgactgaagatcaaattaacgaaataaagcgagaagacaaagttagagaaaaaagagtaaaaagaaacgaacaaaggctccaagaaatatgggactatgtgaaaataccaaatgtacgtttgattggtgtacctgaaagtgacggggagaatggaaccaagttggaaaacactctgcaggatattatccaggagaacttccccaacctagcaaggcaggccaacattcaaattcaggaaatacacagaacaccacaaagatactcctcaagaagagcaaccccaagacacgtaattgtcagattcaccaaggttgaaatgaaggaaaaaatgttaagggcagccagagagaaaggtcgggttacccacaaagggaagcccatcaggctaacagcggatctctcggcagaaactctacaagccagaagacagtgggggccaatattcaacattcttaaagaaaagaattttcaacccagaatttcatatccagccaaactaagcttcataagtgaaggagaaataaaatcctttacagacaagcaaatgctaagagattttgtcaccacgaggcctgccttacaagagctcctgaaggaagcactaaacatggaaaggaacaatcagtaccagccactgcaaaaacacgcgaaattgtaaagatcatcaatgctaggaagaaactgcatcaactaacgggcaaaataaccagctaacatcataatgtcaggatcagagtcacacctaacaatattaaccttaaatgtaaatggactaaatacccccattaaaagacacagaccggcaaattggataaacagtcaagacccatcagtgtgctgtattcaggagacccatctcacatgcagagacacacatacgctcaaaataagggagatagaggaagatctaccaagcaaatggaaagcaaaaaaaagcaggggttgcaatcctaatctctgataaaacagactttaaaccaacaaagatcaaaagagataaggaaggccactacataacggtaaagagatcaattcaacaagaagagctaactaccatatatatgtatatatatgcacccaatacaggagcacccagattcataaagcaggtccttagagacctagaaagagacttagactcccacacaataataatgggagactttcacaccccactgtcaatattagacagatcaacgagacagaaggttaacaaggatatccaggacttaaactcagctctgcaccaagtggacctaatagacatctacataactctccaccccaaatcaacagaatatacattcttctcaccaccacatcccacttattctaaaattgaccacataattggaagcaaagcactcttcagcaaatgtaaaagaacagatatcacaacaaactgtctctcagaccacagtacaatcaaattagaactcaggattaagaaactcattcaaaaccgcccaactacatggaaactgaacaacctgctcctgaatgactactggttaaataataaaatgaaggcagaaataaagacgttctttgaaaccaatgagaacaaagacacaatgtaccagaatctctgggacacatttaaagcagtgtgtagaggaaaatttatagcactaaatgcccacaagagaaagcaggaaagatatacaactgacaccctaacatcacaattaaaagaactagagaagcaagagcaaacaaattcaaaagctagcagaaggcaagaaataacaaagatcagagcaaaactgaaggagatagaaacacaaaaaaactcttcaaaaaaatcaatgaatccaggagctggttttttgaaaagatcaataaagttgatagaccgttagcaagactaataaagaagaaaagagagaagaagcacatagatgcaataaaaaatgctaaagggaatatcaccagtgatcccacagaaatacaaactaccatcagagaatactataaacacctctatgcaaataaactagaaaatctagaagaaatggataaattcctggacacatacaccctcccaagactaaaccaggaagaagtcgaatcactgaatagaacaataacaggctctgaaactgaggcaataattaatagcctaccaaccaaaaaaaggctacgaccagatggattcacagccaaattctaccagatgtacaaagaggagctggtaccattccttctgaaactattccaatcaacagaaaaagagagaatcctccctaactcattttatgaggccagcatcatcctgatgccaaagcctggcagagacacaacaaaaaaagagaattttggaccaatatccctgatgaacatggatgcaaaaatcctcaataaaatactggcaaactgaatccagcagcacatcaaaaagcttatccaccatgaccaagtcagcttcgttcctaggatgcgaggctggttcaacatacgcaaatcaataaatgtaattcatcacataaacagaaacaacaacaaaaaccacatgattatctcaatagatgcagaaaaggccttcaacaaaattcaataggccttcatgctaaaaactctccataaactagatattgatggaacatatctcaaaataataaaagctatttatgacaaacccaccgccaatatcatactgaatgggcaaaaactggaagcattccctttgaaaactggcacaagacagggatgccctctctcaccactcctattcaatatactgttggaagttctggccagggcaatcaggcaagagaaagaaataaagggtattcaattaggaaaagaggaagtcaaattgtccctgtttgcagatgacatgactgtatatttagaaaaccccattgtctcagcccaaaatctccttaagctgttaagcaacttcagcaaagtctcaggatacaaaatcaatgtgcaaaaatcacaagcattcctatacaccaataacagacagagagcaaaatcatgagtgaactcccactcacaattgctacaaagagaataaaatacctagcaatccaacttacaagggatgtgaaggatctcttcaaggagaactacaaaccactgctcaacaaaataaaagaggacacaaacaaatggaagaacattccatgctcatggataggaagaatcaatatcgtgaaaatggccatactgcccaaggtaatttatagattcagtgccatccccatcaagctaccaatgactttcttcacagaattggaaaaaactactttaaagttcatacggaaacaaaaaagagcccacattgccaagacaatcctaagcaaaaagaacaaagctggaggcatcatgccacctcgctttaaactatactacaaggccacagtaaccaaaacagcatggtactggtaccaaaacagagatatagaccaatggaacagaacagaggcctcagaaataacaccacacatctacaaccatctgatctttgacaaacctgacaaaaacaagaaacgggacaaagattccctatttaataaatggtgctgggaaaactggctagccttatgtagaaagctgaaactggatcccttccttacaccttatacaaaaattaattcaagatggattaaagatgtaaatgttagacctaaaaccataaaaaccctagaagaaaaccgaggcactatcaatcaggacacaggcatgggcaaggacttcatgactaaaacaccaaaagcaatggcaacaaaagccaaaatagacaaatgggatctaattaaactgaagaccaggccgggcgcagtggctcacgcctgtaatctcagcactttgggatgctgaggcgggtggatcacaaggtcaggagttcgagcccagcctggccaatatggtgaaacaccatttctactaaaaatacaaaaattagccaggcatggtgatgtgcgcctatactctcagccacttgggaggctgaggcaggagaatcgctgaacccaaggaggcagaggttgcagtgagccaaaatcgtgcccctgcactctagcctgggtgacagagcgagactccgtctcagaaaaaaaagaaagcaaaaaaataaataaataaatactgtctgcacagcaaaagaaactaccatcagagtgaacaggcaatctacagaatgggagaaaatttttgcaatctacccatcagacaaagggataatatccagaatctaaaaaggacttaaacaaatttacaagaaaaaaacaaacaaccccatcaaaaagtgggcaaaggatatgaacagacacttttcaaaagaagacatttatgaagccaacaaacacatgaaaaaatgctcttcatcactggtcatcagagaaatgcaaatcaaaaccacaatgagataccatctcacaccagttagaatggcgatcattaaaaagtcaggaaacaacagatgctggagaggatgtggagaaataggaatgcttttacactgttggtgggagtgtaaactagttcaaccattgtggaagacagtgtggcaattcctcaaggatctagaactagaaataccatttgacccagcgatcccgttactgggtatatacccaaaggattataaatcatgctattataaagacacatgcacacatatgtttattgcggcactattcacaatagcaaagacttggaaccaacccaaatgtccacaatgatagactggattaagaaaatgtggcacatatataccatggaatgccatgcagccataaaaaagaataagttcatatcctttgcagggacatggatgaagctggaaaccatcattctcagcaaactatcacaaggacagaacaccaaacgccgcatgttctcactcataggtgggaattgatcaatgagaacaattggacacagggcggggaatatcacataccggggcctgtcgaggggtcagtggctgggggagggatagcattaggagaaatacctaatgtaaatgatgagttgatggctgcagcaaaccaacatggcacatgtatacctatgtaacaaacctgcacattttgcacatgtaccctagaacttaaagtataatttaaaaaataaaataaattttttaaaaatgttaaaaaaaaaatctgtcatcccttcacaaagctaattccttagccacaactaagagttctccgtatccagagtaatccattcttccaaaaatagcactttattttatctatgcaaaaacctttacagtaacaagacaaatcctaaactcttctgctgggtttaaggtctttctaattcagcttctctttattttcctaattctcctctccaacctgggacataaacatattcttatcttcatgtgtttgcttctcaactgcatttcctatcttaagcgtccttttcccatctcacctcctttaagaccatgctagaaatttgatctcctttcaaactagggtgtttttaaccttttggtcctgaaatacctatggcatacatttttatctgttatctgttatcagtggctcattcctggaagcagagtatgcatgtgtgtgtgtgtgctgaatgagctctcatctctaaataagtctgaaaaaatccctcaagaatgttctacaaaatccttggagatataccagcacacatagctttcctcaatcacccagtctgtaccactcattttagcccctgttcatatacttccttgtaccatttttcagtgtgtatttcttgtaccctcagtaaaactaagctactgtcactgaaaccatgctttatatttctcttgtataattacccaaatacaaggctgagtgtcctttaattgttaaacaagtattggttcaattaaacggaagtatttcatagaacttccaaattagggccgggcatggtagctcatgactgtaatcccaacactttgggaggctgaagcaggtggatcacttgagctcagatgtctgagaccagcctgggcaacgctgtgagactccatctctacaaaaaataaaaaataactagccaggtgtggtagtgcacacctgtggtcccagctactcaggaggctgaagtaggactgcatgagcccaggaggtcaaggctgcagtgagatgtgatcatgccaccgaattccagcctgggtgacacagcaagaccctctcaagaaaaaaagaggcacaaaattaacatacaattttcattaaaaggaattatcatttcaacgttatgattagtctcagctgggcgtctcggctcacgctgtacaccccgcactttgggaggtcgtggacacgtggatcaccttcagtcagaagtatgtacccagcctgtacatcatggtgaaa

SEQ ID NO: 29 - DNA, 2467 bp, Homo sapiens
gatctttgcagaaccatcactgcccctcttaacttggaactccccacccagagtgcctcccctaagatgatgaggtgtcagacttcagtggcctgagttctctgaaagcagagactctgagaaagaagactagtcatcaagaccacactaaaaagatgtgtttctgtgccaaagactttactcacaaacaggtaatactatcatctccattttacagaagggaggcccaagtctcataacctcagtcgtaaagctgggattccaagactggctatctgactttgagtcagatataatcatatcttggtcctcagggatatcacagaggcctggcatggcaccagggcatggcccagtgcattggggtatgcccaacaggacccgcagggggcagtgatgagccttcttgtttggattggggacaaatctgcagctacttctttctcaattaaagaggaagtgggaatttaaaaaagactttctgccgggcacggtggctcatgcctgtaatcccagcactttgggaggccgaggcaggtgaatcacctgaggtcgggagttcgagaccagcctgaccaacatggagaaaccccatctctactaaaaatacaaaattagccgggtgtagtggcacatgcctgtaatcccagccgctcgggaagctgaggcaggagaattgctggaacctgggaggcggagattgcagtgagctgagatcgcgcccagcctgggcaacaagaacaaaactccgtctcaaataaataaataaaaataaaaaagactttcaggccgggtgtggtggctctcgcctgtaatcccagcactttgagaggccaaggcgggcggatcacctgaggtcaggagtgcctggtcaacatagtgaaactctgtctctactaaaactacaaaaattagccgggcatggtggtgggctcctgtaatcccagctactcaggaatctgaggcaagagaattgcttgaacttgggaggcggaggttgcagtgagccaagatcacgccactgcactccagcctgggcaacagagccaaactcagtctcaaaaaaaaaaaaaaaaaaaaagactttcatatagttctttccccagaggtctagggatgtggacctgtgagggctgttgtaaatgcgtagctccttattctctgggacatttgttgtttttttgttttgttttgtttgctgtttttttcattttgttttgttttctgtttttgtctgttttttgcaaaactggtgagttactaattaatcctcattcaacatagtcccatcccttccttcctagggcacagagattgtactgaggggagggcaggagagagcaacgtgcaagtgggaaaactgattcaaaataccttgcttcacaatttcaggacagaaaatggatagtgtaagtgacccagagacttggccaatgtgtctctgttaaatacatccacttttaagaaagttagtactgccaggcacagtggctcacgcctgtaatcccagcactttgggaggccgaggcgggtggatcacaaggtcaggagttcaagaccagcctggccaagatgatgaaaacctgtctctactaaaaaatacaaaaattagctgggtgtggtggtgggcacttgtaatcccagctactcgggaggctgaggcagagaattgcttgaacccaggaggcggaggttgcagtgagccgagatcatggcactctactccagcctgagcaacagagcaagactctatctcaaaaaaaaaaaaaaaaagaaagaaagttattacttaatcaaaggagcaaggaaaaaaaaaggaagggggaatttttctttagaccaacttccttttcttgaacctaattctaccccccttggtgccaacagatgaggttcacaatctcttccacaaaacatgcagttaaatatctgaggatattcagggacttggatttggtggcaggagatcaacataaaccaagacaaggaagaagtcaaagaaatgaatcaagtagattctctgggatataaggtagggggattggggggttggatagtgcagagtatggtactggcctaaggcactgaggatcatccttttcccacacccaccagagaaggcttaggctcccgagtcaacagggcattcaccgcctggggcgcctgagtcatcaggacactgccaggagacacagaaccctagatgccctgcagaatccttcctgttacggcccccctccctgaaacatccttcattgcaatatttccaggaaaggaagggggctggctcggaggaagagaggtggggaggtgatcagggttcacagaggagggaactgaatgacatcccaggattacataaactgtcagaggcagccgaagagttcacaagtgtgaagcctggaagccggcgggtgccgctgtgtaggaaagaagctaaagcacttccagagcctgtccggagctc

SEQ ID NO: 30 - DNA, 1527 bp, Homo sapiens
gggggtgaaaaagggggtttgcagaggctgccctggggctggtgctgaaagaagagcccacagctgacttcatggtgctacaataacctcagaatctacttttcactctcaggagaacccacagtctaatatttagacatgatggcaaactgggcggaagcaagacctctcctcattcttattgttttattagggcaatttgtctcaataaaagcccaggaagaagacgaggatgaaggatatggtgaagaaatagcctgcactcagaatggccagatgtacttaaacagggacatttggaaacctgccccttgtcagatctgtgtctgtgacaatggagccattctctgtgacaagatagaatgccaggatgtgctggactgtgccgaccctgtaacgccccctggggaatgctgtcctgtctgttcacaaacacctggaggtggcaatacaaattttggtagaggaagaaagggacaaaagggagaaccaggattagtgcctgttgtaacaggcatacgtggtcgtccaggaccggcaggacctccaggatcacagggaccaagaggagagcgagggccaaaaggaagacctggccctcgtggacctcagggaattgatggagaaccaggtgttcctggtcaacctggtgctccaggacctcctggacatccgtcccacccaggacccgatggcttgagcaggccgttttcagctcaaatggctgggttggatgaaaaatctggacttgggagtcaagtaggactaatgcctggctctgtgggtcctgttggcccaaggggaccacagggtttacaaggacagcaaggtggtgcaggacctacaggacctcctggtgaacctggtgatcctggaccaatgggtccgattggttcacgtggaccagagggccctcctggtaaacctggggaagatggtgaacctggcagaaatggaaatcctggtgaagtgggatttgcaggatctccgggagctcgtggatttcctggggctcctggtcttccaggtctgaagggtcaccgaggacacaaaggtcttgaaggccctaaaggtgaagttggagcacctggttccaagggtgaagctggccccactggtccaatgggtgccatgggtcctctgggtccgaggggaatgccaggagagagagggagacttgggccacagggtgctcctggacaacgaggtgcacatggtatgcctggaaaacctggaccaatgggtcctcttgggataccaggctcttctggttttccaggaaatcctggaatgaagggagaagcaggtcctacaggggcgcgaggccctgaaggtcctcaggggcagagaggtgaaactgggcccccaggtccagttggctctccaggtcttcctggtgcaataggaactgatggtactcctggtcccaaaggcccaacgggctctccgggtacctctggtcctcctggctcagcagggcctcctggatctccaggacctcagggtagcactggtcctcaggggaat

SEQ ID NO: 31 - DNA, 109906 bp, Homo sapiens
gatcaggtatgtatctccttctcatacactaattccttagattatgatacagaaaatactttgaatttttagcttgtgtttgactgtcactttctctggtacctcctctagcaaaaaaaaaaaaaaaaaagcctgaaacgtgactgaaatccatttattaaaattctatggagcagcaatggaattggaaaaagcaggccggcagaagagaaagctatgtaaacctgggttaattcttactcattcttctaatttagctgagatgtcaacttcttttagaaagccttaattcctccttccccagactactctcacagcagagttatcagttatcactgtacttgcctcatgacgttttgtttacccacctctacccaaaaggaccaagttctttgagggcaaagatttctaccttagctcttcaatcctacatctagcactgagtgtagcagcacacagtggatgctgaattaatgaattcataaacttgccacatctattgaagcctcaatataaatggcaaaatgtggcaatcctatttatttatttatttatttattgagatggagtctcgctgtcacccaggttggagtgcagtagagcgatctcggctcactgcaatctccgcctcgcgggttcacgccattctcctgcctcagcctaccaagtagctgggactacaggcgcctgccaccacgcctggctaattttatgtatttttagtagagacggggtttcaccgtgttagccaggatggtctcgatctcctgatctcatgatctgcccacctcggcctcccaaagtgctgggattacaggaatcctctccattgacttaagatgtggttctcggccgggtgcagtggctcacgcctgtaatcccagcactttgggaggtagaagcaggcggatcacaaggtcaggagatcaagaccatcctggccaacacagtgaaaccccgtctctactaaaatacaaaaaattagccaggcatggtggcgcacacctgtagtcccaactactcaggaggctgaggtaggggaatcgtttgaacccaagaggcggaggttgcagtgagccaagatcatgccactatactccagcctggcaacagagcgagactcaatctcaaaaaaaaaaaaaaaaaaaaaaaaaaaagacgtgggttccaaacattttctagaagacctttgattttgttttttttgaggtggagtctcactctgtaacccaggctggagcgcagtggtgcagtctcggctcattgcaacttctgcctcgtgggttcaagcgattctcctgccttggcctcctgagtagctgaaattacaggcaggtgccaccacgcccggctaatttttgtacttttagtagagaccaggtttcaccagatcagggccaggtgcggtggctcaatgcctgtaatcccagcactttgggaggctgaggcaggcggatcacctgaagccaggagttcgagaccagcctggtcaacatggtgaaacccagtctgatcacgccttacaaaaaattacctggacctggtggcacacgcctgtaatcccagctactcaggaggctgaggcatgagaatggctggaatccagccggcgtaggttgcagtgagccgagattacaccactgcactccagcctgggcgacaaagcaagactctgtctcaaaaataaataaataaaactgtctgaacttattaattcaatgcaaacacaactatacccacatactttgagggtctggagatctattcaagccatgaacagtgctaactccagctatgcactcctgccaagatgcttaaatgttatccacttattgaacaatgaccacttgcgtcaaatacaaattcccatactccctcagggtagaaaagtagaactgctctatttcaatccttttttaatcaataccccattaccagttgataacacttcaccactggtatgtctgatgaaatctacaacctatacttcctttactgtttatataataaaattttctattttagcaattgtaacctttcagtgtgtaaaagcaaagagaaaacaataagagctgtgaaacacatcaagaggaagattaattttagcttcaatggcatgaggcaaagtaaaaacttaaagccacacaaaagtaagtgttccatatgactaaaattggtttaaaattatctacactggaacttacacttaaatttatctctttaacaagtgctttttattcaaaagaaaattaagtttcagcttttgtaactacttgaatgttgcaaccaactcagagcttttataagtccttctatgaaatgcactgagaaaaagcatacttgaaacacagctgtatcccaaaaagccacccaattcaccaaacagtgtcacattcagcactgtggtccttactactctgtacatcaaggacacctactacaggtttccttttatttctgttcaattgccaaaacagctcaaagatgcaggtaatgagtaatttacgtggtagcacaattcagaaacttaaaagtcctaaccgagtataggcaatcaaggtaaaaaatgaaattagaaaggaatttaaactcacaaagtagtaagcaaagacaggtttaaaagattcaacactgaactctgcctttaagtaggcaaaccagccaatcttcccccaccccagagacactgaacaaaaccaaccaggttttccataagcaacgctaagttatcaccacactttctcatcggtgaacaattcctaattgaacagaatcatgcaggataaaaacattatgaaatcagtacacacgtcacactggaatggaatttatctttacactgcaccgcggtgcctggattgaaaatcacgaactaggtttaaagaacagagaaaatgacacttggcagaaaacaaacaatgacctgaaatgactctagaagggagattgctttcccttctcaaagtaatctatacagacaagaatcaaactacagactgtgaaataatctggggacctcacagcagttagcttcttacttgctcaaacatcctacaatctctaaaagtcaaacgcacgatgacacaaacataaaaacacaacacatctaacatccaatcattatttattgatttacacaaatacagtgggtgtagggaggaggtgatgcatgatgaaatgttattctcaggtacgcaatacctttctaaatctccgtggaatacatgaattcaacgttttaccttcaccggctagtttttgactaaaataccccatcaccaagtcttttcaatcaaagctctccaaaattctacaatcgagcaaataacatgaaattagaaacattcaatactagactttcctccagaagccctggtaactctctagacatcaggcctatgaggagtaaattaaagcccattaaaaatattcagcctaacacaaatcttccaagaagtgagacttttgtgggtgatgggtaatgtcggtgaacttcctcttcctttaaaaaggtcaaagacagggaagcgtccggcgtcacatttcctcctcagatctctaccacaaaccacatcacaactctcccattactaaaaaaaattatccagaggaactgctttctgtacattttcaccttagactgaaaatccaacatacctcggaaacgagctgattggtttcaaacaagaaatttaccgataaagtttattatgtactaataataattatggaagcccactgtgtcccgctgtagggggagccgaggggaggtgaagagcaggagggtgtaatcctcacaacaaccagagaaaagccttccctgcagggttggtcccaggcaccaagcaaattctgcccaataaagggggggagggtaccttaggggaggaggggagaagggaccccaagctctaaaaggaaggggctgcagaagcatggccaagtggggctagctttcacagtattgcagagggtctgggggtccccccgcagtgctgctgccggggcaccccaaaagctccgcccaagcccgatgcaggggcttgagccgctgtccctttcctggctgggctgtggcggccggcaggagggtcccctgggctgcggggtccccctggactgcgacgacgagaaccgaagggccgacaggaaggtgaaaaggatactgttggggcgcctgagtctggagggccctgatgttcgggtgaggaggggggaccgctgccgccgccgccgccgccgccgccgccgccgccgctgctgccgccgccgggtgaggaggcggtaccgctgctgccgccgccgccgccgctccggtgccgggtccggttcctgctgcagtcgctgtgcctgatttcagagccggtttctgcggtaaactcatggcaaagcgaagccaccaacccccccagagcgggaccgggcgcgccggggtgcaggggccgggggcagcgggggggcgggatgggggcagacccggggaggcggcgggagcggggggctggggggagcctggggggaggaggaggagggggccggggccggtcacacacgcccgacgccgccgccgccgccgccgccgcctccgccgccgccgccgccggcagcagcagccgccccgcgggccagcaccaccggctgccggtctccgtgacaacgcgaccccagggggggggccggacccggcgggggcaggaggcggagagaccggacctttcacggcaatatcctcatgggccggcggcgggggatctttatccccctccccggaggaagcggcgcccttctcggtagcggggctcaggcgatgccggtggattttcttcactcaacgagcagagcatccaacatggcgctgtggccgcctccagcagtccggcaggacggctgctcggaaaacttcggactttttcggaatggctcgggaaaccgagggtgggaagcctcttcggctctttccggagactgctaggggtcgggattcttcggagacgctcgggtgcgtcctcggccgccgttcgggagggctcaggggctaactcgcttcctcggcaaagatcggcgagggaggcttcgctggcttacagcggcgcgggtgcggggcggagggaaagaccaaaggcgaggtctggcttgcgagagtcctcccctgcggcccagcctcgaagaacaatggtaatggccccggagtcggctgttcgctgagccccgctcgcaggggcggagaggcagcggcgaggcgaaaaacccctggagaaggaaccgcttaaccggaatggaacccgttggatagggaccccccgcggggacttcgcgtaaccaatgccacccgccggcctgtaacccacgcatttcacacccattgtgtcgacacttcctcagacgctctgagaggtgaatgaggagccccatttccagaggacacagaggaaaagtgactagcccaaggtcaccctatcgggaaaggacagagcctaaatctaaatgccaccttcatctggatgaaccttgccgcctcccatattggctggggacatgacctgagccgccatatctaatcagcagccttaactgagctctgtggatggattcaaacctaggccttccccaggactggagcgccctttgaccagcagccagtgatcagctccccaatgtcctatgctgggtgacatttgttgataaggattttcttcccagctagacctgccaagatcactcccacccccaaccccgcacaccccactccttagcaggtgccttgtcctaagcacagtggcattgagtgggaaagaatggcaggcatcggccgggcgcggtggctcacgcctgtaatcccagcactttgggaggccaaggccggtggatcacttgaggtcaggagttcaagaccagccttgccaacatgatgaaacctcgtctctactaaaaatacaaaaattagccaggcgtggtggcaggcaccagctactcgggaggctgaggcgggagaatcacttgaacccaggaggcggaggttgcagtgagctgagagagtgccattgcacactagcctgggcgcgacagagtgaggcttcgtctcaaaaaaaaaaaaaaaatggcaggcgtcatggagcaatcaagttttaatataatatttaccagacatggcactaagcgctgtacccttcattatctcaagcagtcctgtgaaataggtagtatccattttacaaatgaataaactgagactggggaggctcaataccatcaaaccacagaaaagctgagaaaattgaggctcaaaacgcacaaaagacttccccgaggtcgcaccgacagtgtggctggcagagctaagattagagtctagttctgactcctgctatcctgcttcacacactgccttactattttgttgttgctgttttttgagacggagtttcgctcttgttgcccaggctggagtgcaatggcacgatctcggctcacggaaacctccgcctcccatgttcaagcgattctcttgcctcagcctcccgagtagctgggattagaggcatgcgctaccacgcctggctaattttgtacttttagtagagacggtgattctccatgttggtcagtctggtctcaaactcccaacctcaggtgatctgcctgcctcggcctcccaaagtgctgggattacaggcgtgagccaccgcgcctggcctattgttgtttttaattcatataaagctctacacatagtggatgcttaattcgtgacaatccctgggagccccaaatgctccttctaggataaaagagcatctgaaagagagtgataccacaacccccctacggcgtctttctagctagagctccacagtttctgacattgaaaaggatgcctcatccccatctccagactggaagacagcagctacttcatactgtggcatcttaaactgtctggatttgtaacacctgatttttttatttatttatttttttttttgagacagtctcgttctgtcgcccaggctggagtgcagtggcgcaatcttggctcgctgcaagttctgcctcctgggttcacgccattctcctgcctcagtctcccaagtagctgggactacaggcacctgccaccgtgcccggctgattttttttctctttttgtatttttggtagagatggggtttcactgtgttggccaggatggcctcgatctcctgacctcgtgatccgcccgccttggcctcccaaagtgctgggattacaggcgtgagccaccatgcccggcctgtaacacctgattatttaggatgggattttctgctcctctccacatataattgactccaggaagaattccctagtggtccttcagttccccagattctcctttcattttctggaatctcaggcatccttatcccaatcaaaacctgttccaaggaaattatttgacttctcatttacactagggtgataacaggccgataattgcctaattgttattcttttctgagctagcttcattttctaacttaataatagctacaagcatcagacaattactgtgtgccagtcttagctaagcactttatgaaacttatctgttttaaaatggatagaccttgggcaaaataatgtaaaagtccctgataagattctggccacaggcaatcaatggaggaagtttgtagggaacaaagtcaaaaaggtagagctctgttctttcagcccaaagaatggccttgctcaagtctagacctcacttgcatatatatatatattatataatttattaattaattaattaattatatatttaatatattatatataatatatattatatattatatatatcaagcagcagatataatatataatatatataatatatataatatatattgtatattatataatatataatatatataatatatattgtatattatataatatataatatatataatatatattgtatattatataatatataatatatataatatatattgtatattatataatatataatatatgtaatatattatgtaatatattatataatatatattatatattatatataatatatattatatataatatatattacataatatattacatatattacgtaatatatgttatatattacatataatatataacatatattacgtaatatatgtaatatattacatataatatatacattatatgtaatatatatgttatatattatataatatatattttatatatatatatatgattgttgttgttttgagacagagtctcattgtctcccaggctggagtgcagtggcacgatctcagctcactgcaacctccacctcctgggttctagcgattctcccacctcagcctcccgagtagctgggattatcgtgtgcaccaccacgcccagctgattttttcgtatttttagaagaagtagggtttcaccatattggccaggctggtcccaaactcctgacctcaagtgatccaccagcctcggcctcccacagtgctgggattacaggcatgagccaccgtgcctggcctatttatttatttttgagacaggatctcaggctggagtgcagtggctcaatcacggttcagtgcagcctcgacttccccaggctcaggttattctcccacttcagcctcctgagtagttaggactacaggttcgcaccaccatgcccggctaacttttgtattttcttgtagagacaagggtctcaccatgtaatccaggctggtctcaaactcctgggctcaagtataatctgcccacctcggcctcccaaagtgctggaattacaagtgtgagccaccactccctgcttctacaaatttaaaaactgagattcaaagatgtgaaaattctcataacttttaagtaaatgtacagggattcaaacccaaggcatctgactctaggtctgatttgccaggttgccttcagcatagcaacctacccactatggccagaggtactgtcaacaagaaaagctgattttgttaactttcctgttaccatcaccttcaggatccaatctaaatctaaagtccttcagagtctgggctctgcttccaatctgccacactccacctcaaattcagagctgcagccaccttggtctattggaaatgaaaccattctccttgccctggggcccatgtgcagcctgctgctgctccctgtatccctaaaccgtcctcactccccttagccaattggctaattcctgattcaaggtttggctcaagcatcacctcctcaaggcagccttttttcactccccaagctgaactagggacccttcctctagatccccttggcagtggatgcttaaaactctcagggcactctccacgagtgcggccactgaaagcaaatgacctgagtttgattcttagccctaccattgattagctgtatgatcttggagaacgcacttaatttctccaagccttggttttcttatctgtaaaataaagaggttctacctcctagagttatcataaaaaataaaacaaatgtggccaggcgcagtggctcacgcttgtaatcctagcactctgggaggccgaggccggcagatcatgaggtcgggaatttgcgaccagcctggccaacacagtgaaatcccatctctactaaaaataaaaaaattagctgagcgtggtggcggtgccagtaatctcagctactttggaggctgaggcaggagaatcgcttgaacccaggaggtggaggttgcagtgaaccgagattacaccactgcactccagcctgggcaacagagctagactccatctcaagaaattaattaattaattaataaaacaaatgcaaaacccttagctcagtccctggctcatagtaattcttggataagttttagctatttctttttcatttatgcagggagattacttagcctttttgtttttttttttttttttttttttgagacatagtttcgctctagttgcccaggctggagtgcaatggcacgatctctggctcaccgcaacctccacctcccaggttcaagtgatcctcctgcctcagccttccaagtagctgggattacaggcatacaccaccacgcccagctaattttgtattttcagaagcgacggggtttttccatgctggtcaggctggtctcaaactcccaacctcaggtgatctgtccgcctcggcctcccaaagtgctaggattacagtcatgagccaccgtgcccggccagagattacttagtcatttaaaatatctctgacatctagtactcaataaataggatgtgaaatttgctgaatgactgaataatcgtgaattgcctaaagatttggtgttaccctggagaagttctgagtcacacaagaggccagactgagtctcactgcacagggagagagaaaagcaagagtatcctagagcaggccctgctagcccacgagacgggcattgtgtctttgaccagccatctactgttcccagagcccagtgcagcctctgtcaaagaccaacattcccaaagagctagatgacagatgaagactcagcttataagcttgtacatttcctcatagctgggtgatggtgtgttgcttgttaccatgtgggatcatggctctgtttgcctcagtgagctgagaattggacccagggggactacttagtttcttaattaagtccatgagccttggtttgctgtgtcctggcaacaaagtctttttgaacaaagtgacttggtaatctaaactttccagtccctaagggtaaagttcatcacccgccccccccaaaaaaataaaaataaaaataaaaaactttccaaaatgttgtggcaagttggagttctctgaccctttcattttcctcctggagggactggcctttaaaagcaagccatgttatgccaagagaagccatttgtattagcccagagagacttgagtatcattagatgctctgcacagaaatacgcaaacgtccaccaaggcctgctgagaatacatctagacccaaggtaattaaggcatagagatgggaggccaaagagattaaaaaggaaggacggccgggtgcggtggctcacacctgtaatcccagcactttgggattagggaggccaaggtggatggatcacgaggtcaagatgttgagaccatcctggccaacaaggtgaaaccccgtctctactaaaaatacaaaaattagctgggtgtggtggcacatgcctgtagtcccagcttctcaggaggctgaggcaggagaatcgcttgaacctgggaggcagaggttgtggtgagctgagattgcgccactacaccccagcctggcaacagagcgagactccgtctaaaaaaaaaaaaaaggaaggaggagaaggaggaaaaggaggaagaagataagcaggaggaggagaaaacaaagaagatgaaggaggagaagaaaaaggaggaggaagaggagaaaaaaaaggaggtggcggggaggaagctgggcactgtggtccacacctgtaatctcaatgctttgggaggcctagggggtaggatcacttgaaaccaggagttcaagaccagcctgggcatcctagtgagttgctctctctacaaaaagagtttacaaattagctgagtatgatgccacgtgtctgtagtcccatctattgggaaggctgaggcaggaagatcacttgagcctacgagtttgaggctgcagtgagctatgatggcaccactgcactccagcctgagcaacagaacaagaccctgtctcaaaaataagtaaataagtaaataataaaataaataattagccaaacatggtggtacacaccaataatcccagctatttgggaggctgaggcaagaggatctcttgagctcaggagttcaaggctgtagtaagctatggttgcaccactacattccagcctgggctacaagacaagaccctgtctttaaaaaataaatataaaggaagaagagactgtggggctcccacctgaaatagacatggaggaaggagagaaaccccagtaggaaaagtaaagatttagctccattccccgtatgcaagtacgttcatgatgggccacaaatgctcatctgcatagagctgagccagttggcccttccaaatgccttagggcccagggatatatggtggtgtgtgagggtggtggttccttttatggctataagacagatccagattctaaccttatagaccaagctgtaccaccctaagtaagtttcctaacttctgtggaccatttgccaaatgaaggtaagtcagcctctaacagattagaacaagaagtaaaggaacttgtctgcagagactgtcaacagggcctagggcacaataggcagctcagcaacccttacttccttccctattcccctcagggtgaagtttcagcttctttgatttaacatcactctcacttctggagccaagctgtcctacctctttgcccacagcacgtgtgattcttacagctgtcagcaattcctagagttgaccacagcccttccagccacagtggccttagatagttcaggttcattaggatgcaaaagagagcaaaaagtattatcatagaatgcttaagatggtaagtgttgctatgtgtgttttagcacaatttctaacaagtattacagagactggtcgggctggaaacaccctcaaggattacctttctcaggctcctggtttaggcacagagcacagagttggaaaaggatttcctcaagcaagtgagcagcagggccaagacggaacgacctctctaaggtgtctctcacgatgtgatcctatcctctcattcggaagtaggatcctactgagcgcagtggctcacttctgtaatcctaacactttgggaggccaaggtgggtgaatcacttgagctcaggtgtttgaggccagcatgggcaacatggcaaaacccagtctctactaaaaatacaaaaattagccaggcagtggtggtgcgcccctgtggtcccagctactcgggatactgaggtaggaggatcactgtagcccaggaggtcgaggctgcagtgagccatgattgtgcccctgcactccagcctgggtgacagaacgggaccctgtctctcaaaaaaaaaaaaaaaaaaaaaaaaggtgggatcagccaggtatcctgctgtagctcacacctgtaatcctaacactttgggaggccaaggtgggaggatgccttaagcccagaagttcaagaccagcctaggcaacatagcaagaccccatttctacaaaaaaaaaaaaaaaaaaaaagtatctgtgtgtttggtgcattcctgtagtcccagctacttgaggttggaggatcacttgagcccagctgtgagccgcaattgtgccactgcaattcagtctgggcaacagagcaagaccgtatctcaactaaaaaaaaaaaaaagtcgtcactgggcacagtggctcccacctacaaacccagctacttagggaactgaggcaggaggattgcctgatcccaggagttcaaggctgtaatgaactgacagcaccactacactccagcccgggcaacagagcaagaccctgtctcttttattctattttattttatttattcattcatttatttattttttgaaacagagtttcactcttgttgcccaggctggagtgcaatggcgcgatcttagctcactgcaacctccacctcccgggttcaagtgattctcctacctcagcctcccaagtagctgggattacaagcgcccaccaccatgcccagctaattcctgtctcttaaaaataaaaaataaaaataaaaataaaatatatatatatttctttttagggctgaataatattccatggtatggatataccacattttgtttatccattcatacaccaggggagatttgagttgtttccaccttttggctattgcaaataatgctgctatgaatataggtgtacacatacctgtttggattcctgctttcaattctttggggtatatgcctagaaattggattgctggatcatatggtaattctatatttaaccttctgaggaaccaccatactgttttccgtagcagctgtaccatcttacatcatctctaccagcaaggcacaagggttcgaatttctccacatcctcaccaacacttgttattttctgtttgttttgttttgctttttttttttttttttttcgagacggagttttgctcttgtcccctcggctggagtgcaatgatgcgatcttggctcactgcaacctccgcctgctgggttcaagcaattctcctgcctcagcttcccgagtaactgggattataggcacgtgccaccatgcccggctaatatttgtatttttagtagagacggggtttcaccatgttggccaggctggtctcgaactactgacctcaagtgatccacccgcctcggcctcccaaagtgctaggattacaggcatgagccatctgaatagttataatatatagtattaatacataataggctgggcacggtggctcatgcctgtaatcccagcacttagggaggctgaggcgggtggatcacccgaggtcgggagttcaagaccagcctgaccaaaatggagaaactctgtctctactaaaaatacaaaattagccgggcatggtggcgcatgcctgtagacccagctactcgggaggctgaggcaggagaatcgcttgaacccgagaggcagaagttgcagtgagccaagattgcaccactgcactccagccaagagcgaaactctgtctcaaaaaaaaaaaaaattaatatatagtagccatctgaatggttgtgaagtgatatctctttgtggttttgatttgcatttccctaatcattggtgatgttgaacatctttttgtgtttttaatgaccattcaggttctttttctttctttttttttttttacggactctctctctctgttgcccaggatggagtgcaatggcacaatctcggctcaccgcaacctctgcctcccaggttcaagtgattctcatgcctcagcctcccaagtagctgggattacaggcatctgccaccacacctagctaatttttgtatttttagtagagatgggggtttcactatattggccaggctggtcttgaactcctgacctcaagtgatccgaccgcctcagcctcccaaagtgctgggattacaggcgtgagccaccgtgcctggcctctttgcccatttttttaatcaggttgtttattttgttgttgctattattgagttgtagaagttctttccagctctgccacttttatctgtgtgtccttgaggcactgtgcctcagttcactaaattgcaaaaacacaaattttggccaggcacagtgctcacacctataatcccagcactttgggaggccaaggtaggaagatcacttgagctcaggagttcaagaccagcctggactcatctttactaaaaattgtaagaattagccgggcatgatggtgtgcacctgtagtcctagctactcaggagactgaggtgggaggattgcttgagcctgagagatcaaggctgcagtgagctctggttaccccattgcacttcagccagcctaggtgacagagtgagaccctgtctcaacaaacaaacaaaacatattaaaaactctattaatttctactacttccaagggttattgtgagggctgtaagctagcaagctgaaaccaaccactagtgtgtctgtccgataaaaacaacaactaacgttgactgagcactcattatgtgccaggcattaggcaaagctcttgacatgccttaactcattaatcaggctctgtgtgttaataatacctgcatgtaggaggtgagccatggcaggggcttcattttttcctctggctaatcacccagcatgttcaggaggaagccgctggacctggggcaaggcagccttagaccttgctgatgccaggccttattagcacaaccctcacatacaccaaatccactaagctaccccgttgctgaaatcgacatgcacctccaccaagcctggctcagtgaaggtctctaatacatgcctaacaggcctccagcagtctctaagccaaggggcttcacccactcacccgcacttctcatcttgaatctggaaaccacattcttctaccctgggtggcacagccttcccctggccctggttgaacctgatgccatttaaatatcctgccaagcttgctgccttgagaaaaccttggacactgatttacctcctatctaatgactagaagaggaagctggatttccagatgcccacagctggcgtcaagcaccaggctggctccagtgatctctgtgggagccagcctgccagcctggcctggcctgcccatactccagacacctggaaagagactgaagcgttgctatgctctgccttttcccaccagcaggagagtgaaaatagcagtgatttagaattaattctgcagatgaacatttttcggtttcccaaatttggcaatccttctctccttgttttttccaccttcattgcatgccttttcttctacttgaataaagaagatgaagaagatgcttggttctcacctttcatgcagggtatgtggatattggatagagtccagcctcttcagctgggcacctgctgccccatcacttctggctcttgccaatctctgcagcctcagttcccagccctctcccactgacatgcacccagaacagccatggattttcatgtctctgagtctttccatttgctattccctccagctagagtatctcctgctcctggcttgcctagaagttccaatttatcctttaaaacctagctcaaggccagacgcagtggctcacacctataatcccagcactttgggagaccaaggtgggtggatcacccgaggtcaggatttctaaaccagcctggccaacatggtgaaaccccatctcactaaaaatacaaaaaaaattagctgggtgtggtggtgggagcctataatcccagctacttaggaggctgaggcaggagaatcgcttgaacccaggaggcagaggttgcagtgagccgagatggcgccgctgcactccagcctgggtgacagagtgagactccatctcaaaaaacaaaacaaaacaaaatctagttcaggtggcatctgagacaaactttcctaggttccctcctcccagctagacagacttaattgtcccgctccccctgctacttttgtgctgagacattattttcttgtgattctatcgcactatattaataaaaagcttatgtagcctagtacctggcacataggaagtattcaataaacattagcttatttatctcttctatgaagctggaaatggctggggagactatcacaacttgctctttgaacataaagaaaatagaaacctctttcatttcatgccatagcatggctggctttcagctttggccaagaacactaagttacatttttggccttctcaaccgaaagtgttggaaagggcccccacacccataaatacatgtaaaacgcccatatctgttatcagcctggagctcccttcacttctcaggcttgtaattacttgtatcatggctgttccctgctagagagtaagctccaacgacagggactgtgacctccaccttcactgctgtatgtccaacacagttcctggcacaaaagaggtcctccataaacactggagggatggatgctgattgaggtattgggtgtaaccctactctggcaggtgtggggaataccttctatttggggaggttggagttctctcctgtacaagagtttctggagtggccttccctgtacaaaagtttctggagtggacttccctgtacaagagtttctggagtggacttccctgctcttaggagaacacctgagcccctctctttggcatcataactgagaaatatgggagaagaagggcccaggtctattctacttctgtggcataggttttagaaaacaatagaccttggctccaatccaagttctgagaccttagttaagtcaccctgaaggctttgatttctctcatctctatgaaggggattatagtagttccagtgttccagcaaagatgtgaggtagaaagatctagcacaatactggacacataggagatggtcaagaaatgaggacagttccattgcactccagcctgggcaacagagcaagactccaaaaaaaaagagagaaaaagaaagagagagagagtgaggggaaagaaggaaggaaggaaagaaggatggatcccctttcttctccctaacagttgtgaaagaagaataaatcttggggccccaaaatcactaagctaaagggaaaaatcaagctgagaactgcttaggagaaacctacgtcccattgtattcaaagtcacccctctgctcactgaaataaatgcatatctggttacctcctttggagaggctaatcagaagctcaaaagaatgcaaccatttgtctcatatctacctatgacctggaagccccctccccacttccagttgtcccgcatcttgattgatgtctcatgtctccctaaaatgataacacccagctgtgcccctaccaccttgggcacatgccatcaggacctcctgaggctgtgtcaccggtgtgcatcctcgaccttggcaaaataaactttctaaattaactgagacctgtgtcagattttcagggttcacaaagacttcctcatctttcctgacgctctttcgggagaggaaattccatgtagctcagttgtagaactacacccagctctaacccacacccagctctaacccacacccagctctaacccacacccagctctaacccacacccagctctaactcacacccagctctaacccacacccagctctaactcacacccagctctaacccacacccagctctaactcacacccagctctaactcatggccagaaagacacagtggttaggagctcaggctcttgaggcaggttgcttgggttcaaatctcagctcactagctgtgtgaccttgagcaaaacatttaatctctctctacttcagtctttttttttttttttttttttttttttagacagggtctcattctgttgcccaggctggaatgcagtggcatgatcacagctcactgcagccttgccctcctgagctcaggtgatcctcccactttagcctcctaaatagctggaactgtaggcacatgccaccatgcctggctaatttttgtatttttggtagagacaggagttttgtcatgttgcccaggctgatcttgaactcctgggctcaagcgatcctcccgcctcagcctcccaaagtgctgggattacaagtgtgagccactgcacctggccttcttcagtctctttttcttttcttttttttttttttgagacagagtcttgctctgtcgcccaggctggagtgcagtggcgcgatctcggctcactgcaagctctgcctcccgggttcacgccgttctcctgcctcagcctcccgagtagctgggactacaggagcctgccaccacacccggctaattttttttgtatttttagtagagacggggtttcaccgtgttagccaggatggtctcgatctcctgacctcgtgatccgcccgcctcggcctcccaaagtgctgggattacaggcgtgagccactgcgcccggtcttcagtctctttatctgcattatagtaacgataatgatagcattgatctcataagacattggtttttttttttttgtttgttttttttttttgagatggagtctcgctctgtcacccaggctggagggcagtggcgcaatctcagctcactgcaacctccgcctcccaggttcacgccattctcctgcctcagcttcctgagtagctgggactataggtgcctgccaccacacccggctaattttttatatttttagtagagatggggtttcactgtgttagccaggagggtctcaatctcctgacttcgtgatccacctgcctcggcctcccaaagtgctgggattacaggcgtgagccactgcgcccggcctcataagacttcgtaatgagtaagtgagaaagtgccttgtgtgcagtaagccctaacaaaaccaagacttgagccagctcttgtattcaaggtgaatgtaacacctcgcatacactcagtttggtcatcctcatagccgcccatggctggatctgccacagtgactttgggtttgtcaggacttgaatctctggactgccattccctgaccgctcaccctatttctggcctagaagtaaaggaaaaccaagctgcagaaagttgtccagtgacactgaatagtgggcaaagcccaggctctggagtccagcccaacctgggttggaatctgagctttgcagcttcctggctgagttccttttcctctccatattccagtttcctgctaagaacaacaacgtctatcttacagagctgatttgagaattagaggagataacatatgcaaagcactcgggatggggccaggtccagaggagatgcttgggggacagtgactcccttcctcactctcctgctgccattctgccccctccccactctggcactgcccaccaagttcaaaagcggctgctgcagctgtcgtttctgaaaatacacccctggttgcttttgtctttccatccaagtcttccccaaacctttaaacatccccaaatcaagggtttcaaaagacaaaaagcccaagctgacttatccagaccactctgttggcaaatgtcccagaggatcttgctctgccagtcaccaagtttgaccttcagctccctcagtcaaattcactcacatttgacaagatcaatgagaaaaataggcagcgatgatcaaaagggccgaccaaggctcttggggcaactatcccagcgggatttcatgccatacaaaagtgcatgcagggggtgttccataaaagctcctccactcgcaggcatccctcatgcctagagacaccaaaaaatggttcccatgacaacactgctgcaaatgttatatataaatgtgtgtgtgtgctcctgtgtgtacatggtcacacagagatgcatggaaataaactcttggcacaattttttcctgttccaaacatgaaataacctacaaggattgattgctggagaaaagacgataaaggctttgaacaaatacacttccaaaggcctggcttccgttgattacacctgttttgatgtgggtcggttttgtttcctgtacctggactagtagatactcagtttataattgttgaaggaatgggtaattgatgggtaagtagaagactgggagggagaaagagaggaagagaagcagcctgaatgtcagagctggaggggctcctatgagtatccagtctaatctaacctgttctttttctttttctttttctttttttaaacggagtctcggtctgtcatcaggctggagtgcaatggcacaatctcggctccctgcaacctccgcctctcgggttgaagtgattctcctgcctcagcctcccgagtagctgggactacaagcgcgcgccaccatgcccagctaatttttgtatttttagtagagacggggtttcaccatgttggccaggatggtctctatatcttgaccttgtgatccacccacctcggcctcccaaagtgctgggattacaggtgttagccaccaagcccagccctttttctttctttcttttttttagaaattttttatttccatacgtttttaggaaacaggtggtatttggttatatgagtaagttctttagtggtgacttgtgagatttgggtacacccatcgcccaagaagtatacactgaacccaatttgtggtcttttatccctcactcccttcccatcctttccccttgagtccccaaagtccattgtgtcattcttatgcctttgcatcctcgtagcctaattcccacttatgagtgagaacatacgatgttcggttttccattcctgagttacttcacttagaataatggtctccaatcctatccaggttgctgtgaatgccattaattctttccttttttatggctgagtagtattctattgtgtgtgtgtgtgtgtgtgtgtgtgtgtgtgtgtgtgtgtgtgtggtgtgtgtgtatttctttatccactcattgattgatggtaaccccttatttttctgttggagaaactggggctcagaaaagggaaggaatcttgttaaaagctacaaaagaaattgccagcagaactccagtcccagaaatccattaagtaagcacttaataagtgagttaaatttcttaaatttctatgtgaataataaacatatattgaacaattattacgtgccagcaactgtgctaagtacttcatagacattatctcatttacaatttaaaaatatgcaaaagatgtgttagaattcccatttaacaaaaagggaaactgcagctctgaaggctgggcgtggtggctcatacctgtaatcccagcactttgggaggctgaggagaggagaatcacttgagcctaggaattcaagaccagcctgggcaaaatggtgaaaccctgtctctaccaaaaatacaaaaattagctgggcttggtagcatgtgcctgtagtcccaactacttgggaggctacggtgggaggatcgcttgaccccaggaggcagaggttgcagtgagctgagatcacgccactgtactccagcctgggtgacagagtgagatggtctttaaaagaaaaaaaaaaagaaaaaacgaagtcacttgatgaagtttatagaactagtttatagttggggtggggtttaaacccaggtcactcaaacaccagattctgaacacattactcagtctccttctgaacttagggccaagggcgtggggcagggattatcagctccattcttgcagatatcaggagctgagaaatgtgaagtaacttgcccaagtcaggaaactgaggggcaagaactagaactcacattttcaggcacccagtccagaattccttcagcttactcactgccttctaaccaacatctaaaaaacagaaagactggctcctgtcagcccgagtcagccatctcactgggcaaggagagggtacgcccttcagctgtctgcatcccaggattcggtctccaggaggtggacccggggcctattccaagcgtctctttgggtttttctgccctctggtggtaaatcttgaaactagcaagaaacagcttgcctgaacttcccagcacgcttcctctgtagaacaaagtttttgccttagtgctctgggaaaaaaaatggaaatggtacaagaggttgaggcagccaagcatggtggctcacactgtaattccagcacgttgggaggccaaggtgggaggattgcctaaacccaggacttcaaaaccagactggtcaacatggtgagaccctcatctctataacaactaaaaaattagccaggcggtcccagctactcaggaggctgaggcaggaggattgcttgagcccagaaggttgaggctgtagtgagccgtgattgcaacactgttctccagcctgggtgacagagcgagaccttgtctcaaaaaaataatacataaataggttgggtgtagtagctcactcctgtaatcccagcacttcggaggccaaggcgggcagatcacctgaggtcaagactttgagaccagcctggccaatatggtgaaaccccgtctctactaaaagtacaaaagttagctgggcatggtggcaggcgcctgtaatcccagctactggagaggctgaggtaggagaattgcttgaaccctggaggtggagggtgcagtgagctgagatgccactgcactccagcctgggtgacagagtaagattctgtcttgaaaaaaataaaaataaataaataaataaataaaagagttggctgggtatggtgactcatgcctgtaattctaactcggaggctgaggcaggtggatcacctgaggtcaggagttcgagaccagtctgaccaacatggtgaaaccccgactctaatttaaaagaaaaaaaaatatatatatatacacataaaaattagctgggcatggtggtggacacctgtaatcccagctactcaggaggctgaggcaggagaatcgcttgaatccaggaggcggacgttgcagtgagctgagatggcgccattgcactccagcctgggctacaagagcgaaactccatctaaataaataaataaataaataaataaaaatacaaaagtaaaataaaaaagggttgaggttcagtctccctgctgccctggatgtgccatgctccccttttttctctgcttcctgactgttctccccatttccactctggctctcctccgatccattctctgtgcagcctgctgaacagcttttcaaagacccaaactaatcatgtgactcgctccctgcctatactccccagtagcttcccattgctctcaggataaagtccagtcgtcctcttatgacccgtaggatgcagcgaatggcccctgcctctctctctctccatcccccctctctccatcatcttcagctgcactgggccttcttccagttgcttgcatatgtccaagcctcttcctaattcggcgttacaaatgctgttccctttgcctggcacacctagaaaattcctacttgttcttcaagtctcagtttaaaggtacttccctagagatacactttttttttctttttctttttttttttttttttttttgagatggagcctcactcagtcccccaggctgaagtgcggtggcacgatcttggctcactgcaacctctgcctcccaagttcaagcaattctcctgcctcagcctcccgagtagctgggattacagtcccccactaccacgcctggctaatttttgtatttttagtagagacggggtttcaccatcttggccaggctggtcttgaactcctgacctcgtggtccacctgccttggcctcccaaagtgctgggattacaggtgtgaggcaccatgcctggctgagatacactttttttttttttaatttttgagataggttctcactcttcacccaggctggggtgcaatggtgtgatcatggctcattgcagcctcaacctctcaggcttaagtgattctcccacttcagccttctgtgtagctgggatcataggtgcatgccactattcctggctaatattttaaaaagattttgtagagacgggggtctccctatgttgtactggctggtcttgaacccctggcctcaagtggttctcctaccttgacttcccaaagtattgggattacaggtatgagccactacaactggcagagatacttttttttttttgagacggagtctccctctgtcaccagcctggagtgcagtggtgcaatcttggcccactgcaacctccgcttcctgggttcaagcaattctcctgcctcagtctcccgagtagctgggactacagacgcatgccaccatgcccagctaatttttttgtatttttagtagagacggggtttcaccatgttggccaggatggtctcgatctcttgacctcgtgatccacccgccttggcctcccaaagtgctgggattacaagtgtgagccaccccacccagtccagaaatacacttttatattgccctgcacttccagttttagagtattctttggaattgtagttacttgtctggtgactgccttttgcttatttttaatttttttatagtgacggggcctcactatgctgaccaagctggtctcaaattcctggctgtccttctgccttggcctcccaaagtgttgggattacaggcgtgagccaccagttccggcccaaccttacttcataactaacaagaaccctatctcattccatgttgtattcccaacacctagcacaattcctagcacatggtaggttctgaatattagttgaatgaataagtgagtgaagacagcaagccaaagaactggaagccgtttgagaattcagaagtcgcttgggatcctgcaatatctcatccgtgtaagtctcagctgcagtttatccattgcttaaagtcatatgcgtggctaataatcaggaactagttactttcctattatattagctcaaggtattattccttaggtaaaaatagattgtgtctcaccacagcaccacgggagtttattccagaacttactttccctcatatctcataatgaactgactgtatcatcacccagaacaagccagcgaatgaccatggcaaccttattttatggtctcccactatctcacaactaactatacagtcttcaccactgaagttagagaggtggccactttgcatctgtatttctgcaccatcagatgcaggtctggcagcaggaaggggctgctgctgcaggaatgcagggaggtctcagcctcaacaaggccctttccccttgtagaacacaagtgttaggctgcagggaaatggcagtgaaccttcacccccagggcacatgtgaagacccactgcagctgggagaagagggagggatggaaaactatcctcgacccaggattgtatgccaataccattacgaggttcctacttttgggaaaggggcaagaaactctcacataggatctgccaaacgtactaggcagagttttggtgctgtggaaagggggaaggagcaagatcactgaggaagccccactctcaagacctagggcgacggagtttgcataagattgaatttgaaccaggacaacagacacccccgctttctaaggctagcaagcatcaagtaacaagcactagcaatctaacttaggggtggaaagctggcaggtagagcagtaacacggagtaaatccctccagcaacccagccctcatcctcagcttgggatgatgctaaaagactggagagccagtggtacaatgaaggtaaccatagcaacaatgaaggtaaccatagcaacaatgaaggtaaccatagcaacaatgaaggtaaccatagcaacaacgaaatccaaaccctgcccaactcctgactagactaacttcagctccaatactaagtgctacatgcccgtttccaggaatgaatactatttaagtctcaactgtcctacacacaatgtcaggcacttattcaaaaattataaaacactaaaaatcaagaaataaaataacaatccaccatcaagatacaaagcagagctgggtgtggtgatgcatgcctgcagtcccaactacttgggaggctgagatgagaggattacctgagtccaggaggtcgaggctgccgtgagccaatgtcatgccactgcactccagtcaggatgacagagcaagactctgtctcaaaacaagcaaacaaataaacaaacaatatagaaagtaatccactaagccagcaatgctaaaaaatgatgcagttgttgaaagcgacaggaattttagtcatgatttatatgttaaagatgctagtagaaaaaatggaccacaaacataaacagctgggcaatttcagcagcgacagaaactatttgagtcaagtggaaattctggaaataaatgcatggtaacagaggatgcatgccttctaagggtgtatctatatcagcagactccacaaaattgaagaaagaatctaaaaaaattgaaaaataggttgatagaaattacctgcactgaaatacaaacagaaagataaagccagacacggtggctcacgcctgtaatccagcactttgggaggctgaggcaggcggatcacgaggtcaggagtttgagaccagcctgaccaacatggtgaaaccccgtctctactaaaaatacaaaaagtagctgggcatggtggtccacacctgtaatcccagctactcaggaggctgaggcaggataatcacttgaacctgggaggcggaggttgcagtgagccgaggtcgctccactgcactccagcctggatgacagagtgagactcttgtcttgaaaaaaaaaaaaaaagaaagaaagaaagaaagaaaaataagtgaaaaaacgaagaacagagcatctgagaactgtgggacaacatcaggttttcaaatatacatgtaattggactcacagaaggaagagaaagagaatagggagaagaaatgtttgaagagataatggctgagaattttccaaaaatagtgaaaggcatcaaaacatatgtccaaaaatcacagagaatattaaatagtatagatatcatccccacaaaaaacaaaaaccatacctagatacatcatagtcaaaaagctaaaaaccaaggatatgctgggcatggtggtgcacgcctgtaatcccagcacttcagaaggccaaggtgggtggattgcttgagcccaggagttccagagcagcctggacaacatggcgagacccctgcttctgcaaaacacacaaaaataactggcagtagaggtgtgcacctgtagtcccagctacttgggatgctgagatgggaaatcccttgagcctgggaggcagaggtttcagtgagccatgatcacaccactgcactccagcctgggaacataaggagactctgtctcaaaaaataaaaataaaaaattttaaaaatttttaaaaaaacaaagataaagagacaattatgaaggcagcctgtattagtcagggttctccagagaaacagagccaataagatatggatgggtagatagatagggatgtattataaggaattgcctcatgcaattattgaggcttacaagtcctaagatttgcaggatgagtcagcaagctggagacacaggacagtcaatggtttagttccagtccgagggcgtgagaatcaggaaagccaacggtatggtttctgcacaaaggctggcaagtttgagacccaggaagggctgatttttcagttttttttttttctctcttgttgccccggctagagtgcaatggcacgatctcggcccactgcaacctccacctcccgggttcaagagattctcctgcctcagcctcccaaatagctgggattacaggcatgcgccaccatgcccagctaattttgtatttttagtagagacggggtttctccatgttagtcaggctggtctcgaactcctgacctcaggtgatctgcctgtctcggcctccgaaagtactgggattacaggcatgagccactgcgcctggcctgatatttcagttctgatctgaggcaggaaaggaagaagctgatgtcccagtttgaaggcagtcagatgggaagaattctctgactcagggaagagtcaaccttttttgttctattgaggccttcaattgattggatgaggcccactcatattagggagggcagacttctttacttagtctactgatttgaatctgatgctgaattaaactcatccaaaacaccttcacagaaacatccagaataattgttgactaaatatctgatcaccccatggctcagtcaagtcgacacctaaaattaatcatcacacagccaaagggaaaaaaacaacacattattacatacagaggaacaaagaattatagctgacttcttatcagaaactatccatgcaagcataagacaatgagccgacatctttagtgctgaagaaaccatcaacccagaattctatatgtcgcaagaattgatttgaaaaatgagggtgctggtaacgaattcatacatggtgtaaattgcacagaactctacatgcacacactggaatgcatataaaaactcacataagtgaaatctgaataaggtctgtattctgcttaaaatcattgtactcatgtcagtttcttgaattgacaatatcaggttttgatgttgtacatagttatgtaaaatgttaccattaggagaagctagatgaagggtaagcaggactcttgatgctattttttgcaacttcctatgaatctataattattgtatagattcatttattttaaaataaagaggtatatttattttgttattattattattttttgagacaggatctcactctgttgcccaggctggagtgcaatggcacgatcatagctcactgcagcctccacctcctgggctgaagtgatcctcccacctcagtctctcaagcacctgggactgtaggcatataccaccatgctttgatatatatatatatatatattttttttttttttgacactgggtcttgctctgttgcccaggctggagtgcagaggcgtgatcatggcttactacaaccttgaccactcaggctcaagtgatccacctgcctcagcctcttgagtagctaggaccacaggtgcgcacccctacacttggctaattttttttttttttgagacagggtctcactctgtctcccaggttagagtgcaatggtgtgatctcggctcactgcaccctccacctcccaggttcaagcgattctcctgcctcagcctcccaagtagttggcattacaggcgcctaccaccatgcctggctaatttttgtaattttagtagagacagggtttcaccatgttggccaggctggtctcgaactcctcacctcaggtgatctgcacaccttggcctcccaaagtgctggggttacagacatgagccaccgtgcctggccacttggctaatttttaaagttatttatagaggtgaggtctccctatgttacccaggttggtctcaaactcctgggctcaagtgatcctccctccttagcctcccaaagtgctaggattacaggtgtgagccaccacctcctgccaaaagacatgtttaaattatttctaggccaggcacggtagcttacgcttgtaatcccagcactttgggaggctgaggtgggcagatcagaggtcaagagatcaagaccatcctggccaaaaattagctgggtgtggtgatgcacacctgtattcccagctacttgggaggctgaggcaggagaatcacttgaacctgggaggtggaggttgcagtgagctgagattgcaccactgcactccagcctggcgacagagagatgctccatctcaaaaaaaaaaaaaaaattctgattaccctgaaagataattgacaatctaaagcaaaaataacagcaatgtgggctggactcagtggttcatgcctgtaatactagcactttgggaggccaaggaaagagaatcacgtaagctcaggaccagcctgggcaacacagtgagaccctgtctctacaaaaaaaaaaattaaaaattagctggatgtgcggtggtgcctacctgtggtcctagctgctcaggaggctgaagtgtcagtgagctatgatcgtggcactacactccagcctgggtgacagtgcgaaaccgggtctcaaaataataataataataacaatgtattgttgatttatagatgtggaaaaatacgagcagggtggagatataggggagatattggtcaaagaacagaaaattttagttagtaggagtaatttcaagaggttttttttttttgtacatcatggtgactatagttaacaacaatatattgtatacttaaaaattgctaagagagtagatttttaaagttctcaccacaaataaaatggtgtgagaggtaatgcatatgttaattaatctgatgtagcagtttcacaatgtatacacatatcaaaacatcatgttgggctgggcgcggtggctcatgcctgtaatcccagcactttgggaggccaaggcgtgtggatcacctgaggtcaggagttcgagaccagcctggccaacatggtgaaaccctgtctctactaaaattacaaaaattagccgggcctggtggtaggcacctgtaatcccagctactaggatgctgaggtaggagaatcgcttgaacctgggaggtggaggttgcagtgagccgagatcgcgccattgcactccagcctgtgggacaagagtgagacttcgtctcaaacaacaacaacaacaacaacaaaaaaccccaccaacaacaaaaaaacacatcatgttgtacaccataaatgtatacaatttttggcctggtgtggtggctcatgtctgaaatcacagctctttgagaggccgaggcaggaggatccctttagcccaggaatttgagaccagcctgggcaacatggcaaaacccctctctactagaaacacaaaattagccaggcatggtggcacacacctgtagtcccagctactcgggaggctgaggtgggaggaatacctgaacctgggaggcaaaagttgcaatgagccaaaagcgtgccactgccctccaacctgggtgacagagtgagactctatctctaaataaataaataaataataaatatatgacaataatacacaaaagatgaaagagatgaattgtgaatattcttttttttttttttttgagatggagttttgctctgtcacccaggctagagtgcagtggcacaatctcagctcactgcaacctctgcctcctggattcaagtgattctcctgcctcagcctcccaagtagctgggattacaggcatctgccaccgccccagctagtttttgtattttttagtagagacggggtttcaccatgttggccaggctggtatcgaacgcttgacctcaggtgacccacccaccttggtctcccaaagtgctgggattacacgcatgatccaccatgcccggccaagaagaatcatcttttatgacacatgaaaatcatatggaattcagatttcagtgtccataaggaaaatgtcattggaacgtgctgtctcatttgtgtattgcctatggctgcttttgtcctccaacagcagaacctggtaattgtgacagagacagaatagtctgccaagcctaagatatttactatctggccatctacagagaaaatgtttgccaaccagtgcactatgggtccactaagcagagattctggaatcagtgtttttgctcaaggggttaaagggccttcacaggctgggcgcaatggctcatgcctgtaatcccagcactttgggaggccgaggtgggtggatcatctgaggtaaggagttcgagaccagcctggccaacatggtgaaaacccatctctattaataatacaaaaattagctgggcattgtggcacatgtctgtaatcccagctactcggaaggctgaggcaggagaatagcttgaacccgggaggtggaggctgcaatgagccaagattgtgccattgcactccagcctgggtgacaagagtgaaaataatctcaaaaaaaaaaaaaaaaaaaaggcccttgcaggttggttggttggttggttggttgtatgaaatgtggacccgaaggtaaatgagtaaatgaagctgaaataccagaattgccctgctatcctgcaaagagaaggatccaaaggcttaggggggttggaatgcagagtgcattcttcttggaagacctatttacccactgtgggaggatccagaggacacacctttcaccactgtggtgaatacatttctgagaggagcttcagcatccttgaagagctctgtggtctttttctcttttagttagaaattacggtgggggccgggcgaggtggctcacgcctgtaatcctagcactttgggaggccgaggcgggcagatcacctgaggccagtagttcgagaccagcctagccagcatggtgaaatcccatctctactaaaaaaaaaatacaaaaattagccgggcgtggtggcatgcacctgtagtcccagctacttgggaggctgaggcagaagaatggcttgaacctgggaggcagaggttgcagtgagccgagatcctgccactgtactttagtctgggcgacagagtgagactccatctcaaaaaaaaaaaaaaaagaaagaaagaaattacagtgggaattgctataatttcccattgaactgggatccctaaatacaatgtggataatgagatcctgggatagcaggggtcaagtggcagtacttacttgccaaaaccacagtgcacaggtactgtaatgaacacagagccaaagtagtaaccagaatgatctgactcacagagacctatgcatgcattggctagttgatcacggcatcccttgaaaagaagaatatgagtaatctattaaagtcttttttttttttttttccagatagggtctcgctctgtcacccaggctggagtgcagaatcatggctcactgctgccttgacctcctggggtcaagtgatcctggtgattcccatcacatccccattcaacttacctatttggcctgtgcagaaaacagatgaatcttggagattcatctgtgacagtggattatcgtaaacttaatcagacagtaactcaattgcacggctgtttcagatatggtttaattgcttgagcaaattggcatgttccctgatacctggtatgcagctactgacttggcaaatgccttttgctccatccctgtccataaagaccaccagaagcagtttgctttcagcaacaccttcactgtcctatctcagggacatatcaactctccagttatgtttttttttttaagatggagtctcagccgggcaccatggctcatgcctataatcccaggactttgggaggctgaggcgggtggatcacgaggtcaggagattgagaccatcctggctaacacggtatgtatatatacatatacgtatatgtatatatacacatatatatacatacacacacacaagcacacacacatatatatgtgtgtgtgtgtatatatatatgtatatatatatttagagagtttcactcttgttgcccaggctggagtgcaatggcaccgtctcggctcactgcaacctctgcctcgcgggttcaagcaattctcctgtctcaacctcccaagtagctaggattacaagcatgcaccaccacgcctggctaattttgtatttttagtagagacgaggtttctccatgttggtcaggctggtctcgaactccaggcctctggtgatctgcccgtctcggcctcccaaagtgctgggattacaggtgtgagccactgcgcccagccactaatttttttttttttttttttttgagacagagttttgctcttgttgcccaggctgaagtgcaatggcacaatctcggctcattgcaacctccacctcctggatttaagtgattctcctgcctcagcctagctgggattacaggtatgtgccactatgcccagctaattttgtaattttagtagagatggagtttctccatgttggtcaggttagtctcgaactcctgacctcaggtgatccacccgcctcggcctcccaaagtgctgggattacaggcatgcgccatcgcgcctagcccccggccactaatttttatatatattttgtagagccagggtcttactttatttatcaggctggtctcaaactcctggcctcaactgatcctcccgccttggcctcccaaagtgttgggggctacaggcaggcatgagccactgcacatgtcctattaaattcttacttgagctgaataagcagaagagttatggaatgaatgaagtctaatttgaatcaccaaaacagagaaacatggcctctcaaccagtttctacacttgacttagagaccagaatcccttgaatgaaagggaggacagatgctctaagaaagatctactacattgccaaaaacatatacctttagtctttctcccagtcttccccaagggacctgtggctatttaccagggtgactgcatattggggaaaaggaagtagtaagactttccagggattattggacactggctctgaattgacacttttttctggagacccaaaatgtcactgtggtccatcatcacagtaaaggtttatggaggtcaggtgattgatggggttttagctcaggtcctacttatggtgggcccagtggatgctcagatcaattctgtggctatttccccagctctggaatgcataattggaatagacatactcagcaactggcagaatccctgcattggttccctgacctgtggtgtaagggatattatggtaggaaaggctaaatggaagccactagaactgcctctactcgcaaaattagtaaaccaaaaccactctgcattcgcagagacttcagagatgagtactccatcacggacttaaaagatgcaggagtggtgattcccatcacatccccattcgacttacctatttggcctgtgcagaaaacagatgaatcttggagaatgacagtggattatcgtaaacttaatcagacagtaactcaattgcacggctgtttcagatatggtttaattgcttgagcaaattggcatgttccctgatacatagtatgcagctactgacttggcaaatgccttttgctccatccctgtccataaagaccaccagaagcagtttgctttcagcaacaccttcactgtcctatctcaaggatatttcaactctccagcattttttttttttttttatgatggcgtctcggccgggcgcagtgtctcatgcctataatcccagcactttgggaggccaaggcgggtggatcacaaggtcaggagatcgagaccatcctggccaacacagtgaaacctgtctctattaaaaatacaaaaaattagccgggtgtgttggtgggcgcctgtagtcccagctacttgggaggctgaggcaggagaatggtgcgaacccaggaggcagagcttgcagtaagctgagattgtgccactgcattccagcctgggtgacagagcgagactctgtcacaatttaaaaaaaaaaaaaaagatggagtcttacctgttacccaggctggagtgcaatggcgtgatctcggctcaccgcaacctccgcctcctagattcaagtgattctcctgcctcagcctcccgagtagctggaattacaggtgtgtgctaccacgcccagctagtttttgtatttttagtagagatgaggtttcaccatgttggccaccaagttggtcttgaactcctgacctcaggtgatccacccgcctcagcctcccaaagtgctgggattacaggtgtgagccaccatgcctggccaactctccacctttttgtcataatttagttcacagatttttttttttccttctttttggcagggatctatacaaaattctggcttcaggcagtcctcctgcctcagcctctcaaagtgctaggattacaggcgtgagccaccacacccagctgttcacagggatcttgattgctttcccttttacccaagatgccatatcagcctacacattgatgatactgtgctgaatgcacctagttagcaagaagcagcaactactctagccttattggtaaattcaacacccagttcatgttgggagctcagcctgcatggtaactaaaattcaggggccttctactctggtgacatttctaaggatccagtggtctcaggcatgttgagttagtccttccttttttttttttttttttttttttgagatgaagtctcactctgttgcccaggctggagtgctggagtgcaacggcgtgatcttggctcactgcaacctctgcctcctgggttcaagcaattcacctgcctcggcctcctgagtagctgggattacaggcatgtgccaccatgcctgactaatttttgaatttttagtagatactgggttttaccatgttggccaggctggtcttgaactgcagacctcaaggagataacccttctaagatgaagaatacattgttgcagctggaccctcctacaaccaagaaagaggcacaaggcctggtaggtccctttggattttggagaccatgtatttcacatttgggtattttgctctgacccatttactgagtgatctgaaaagctgctagttttagattatttatttatttatttatttatagctacactctctggaatgggaaaaaactgctagttttgagtgggactcagaacaagagaaggctctgaaacaggtccaggctgccgtgcaagctgcactgccacttgggccataggatacagcagatccaatggcacttggagtgtcattagcagatagagttgtcttcagtcttcggtagacccctctaggtgaatcacagtgcagacccttaggattttgaagcacggccccaccatcctctgtggataactactctcctttttttttttttttttgaccaagtctcactctgtcgcccaggctggaatgcaatggcgtgatcttggctcaatgcaacctccacctcctggtttaagcgattctcctgcctcagcctcctgagtagctgcagttacaggcatgcgccactatgcccagccaatttgtgtatttttagtagagatggggttttgccatgttggccaggctggattgtaggcgtgagccaccacacccagttagcagaagaggattttaataatcaagtggggccaggtgcagtggctcacgcctgtaatcccagcacttttggaggccgaggtgggcggatcacgaggtcaggagatcgagaccatccaagtttcatggggccaggagtcaaagggtagaaattaggagattaggagtgactccaatcaccttttttttttttttttaaggcagtctctcgctctgtcactaggctggagtgcagtggagcaatctcgactcactgaaacctccggctcttttgttcaagcgattctcctgcctcagcctcccgagtagttgtgattacaggcacgtgccaccatgcccagctaatttttgtatttttagtagagatggggtttcaccatgttggccaggatggtcttgatctcctgaccttgtgatctgcctgcctcagcctcccaaagtgctgggattacaggcgtgagccaccgcgcctggcccccaatcacttttatccctactgatgcactagcagcatttctgcttcccgtccccatgaccttaggctctgctagtttagaggttggttccaaagggagaaatgcttccactaggcaacacaatgattacactgaactggaggttgaggctgccactcagtcgcgttgcgctccccatacccaaaattaacaggcaaagaaggaggtcactgtactggctgggatgactggtcttgattactaagggaaaattgtattgctgctacacaacagaggtaagggagagtatatctggaatacatgagctcccttagggcatctgttaatatagacagtctttgtcttacgatgatttgacttatgattttttgactttatgatgggcaaaagtgatacacattcagtagaaactatcctttgaattttcaattttgatctcttcctgggctagcaatatggagtacaatgctttctcatgatgctgggcagtggcagcgaccgcggctccaagtcagccacacgatcacgagggtagacagctgatactgtaatctacagtgtgctgtatttaataaattacgtgagatagtcaacatatctagtcaacaaaataggcttcgtgttagatgattttgcccaaccgtaggctaacggaagtgttctgagcacatttcagggcaaagctatgatgttcagtaggttagatgcattaagtgcattttcaatttaggatatttgcaacttaagatggatttatcagggccaggtgcagtggctcacacctgtaatctcagcactcaggccaaggcaggcagatcgcttgagcccaggaattcgagaccagcctgggccacatggtgaaaccttgtctctactaaaaatacaaaaaaattaggcaggtgtgatagtgcgtggaggctgaggtgggaggatcaccggagcttgggaagttgaggctgcagtgaccaagattgcacactgccctccaacctgggtgacagagtgagaccccatctcaaaaaaaaaaaaaaaaaaaaaaaagaagatggatttatcaggacataacctcattgcaagtggagagcatcagtaccacgtcctgtgactaaagtaaacaaaagcgacaacagcccagttcaggcaggactattaacggtccaggaatttcaggaatgaaggtttgggtcaccccaccaggcaaagaaccatgaccagatgaggtgcttgctaagggaaaaggaatatggaaagggcagtggaggaagaggaattataaagaccagctctgaccacatgaccagttgcagaaatgaggacagtaataactatgagtatttcttccttattttgttatgaatgtttgtatatagattagccaaatatttttgttttcttccctcttattcccttatcatctaacatgagatatattaataatttaggctgggtgtggtggctcacgcctgtaatcccagctttttgggagggcaaggcaggcaattgcttgaggccaaggagtttgagaccagtctgggcaacatggcaaaaccctgtctctacaaaaaatacaaaaaattagctgggggtggtggcgtgtacctgtagtcccagctactggggaggctgaggcaggaggatcacctgagcccaggaagtggaggctacagtgagccgagattgcaccactgcactccagcctgggtgatagagtgagaccctgtctcaaaataaataaataaataaaataatagtaaactttatattatggtatttaggttacaggatatcaaaagagaagaatgagcattatccaaggattttgcatcttctcctggggaagggttggtgtgtttttggttgcatccaggatagctgtatcatgttaggtttaagtatgactttgttattgtgtgtatttggaaatgaagtgtggtttaaggatatcaatgaggaaaattaaaattcttccatgatttttaaaacttttttctttagcctgagtctagttgtctttcctactagattgattgattgattgattgattgatggagacagactctcactgtcacccaggctggagtgcagtggtgcaatcacagttcactacatccttgacctcctgggctcaagtgatcctctcatctcagcctccagagtagctgggactacaggcacgtgccaccacactctgctaatttttgtatttttttgtagagacagggtcttgctatgaagctcaggctggcctcaaactcgtgggctcaagcaatcttcaggctcccaaagtgctggaattacaggtatgagccattgcacccagcttccctattttcttttaaagagatggagtcacagcctcccttttttttttgacagggtttcactctgtcacccaggctggagtgcagtggcgtgatctcagctcactgcaacttctgcatcctgggtcaagcaaacctcccacctcagcctcctgagtggttgggactacaggcatgtgccaccacaccaggctaatttttgtatttttagtaaagacaggtgtcttgctgtgttgcccaggctggtctcgaactcctgagctcaagtggtcctcctgcctcggcctcccaaagtgctgggattacaggtgtgtgccactgcacaagtgccccctttatcctataccaattcccacacagacacagaagtatttcttgctgtctaatccattctaagtgttcagtttctctattcccacaccaataccatatatgtaattcactatcgctttataacatattttgatcaggccagctacttcattgttctattttttctgaattgtctttgcttggctattccttttttttttttttttttttttttttgagatggagtcttgctctatcgcccaggctggaatgcagtggcgcgatctcagctcactcccgggttcacaccattctcctgctcagtctcccaagtagctgggactacaggcacccaccaccacgcctggctaattttttgtatttttagtagagatggggtttcatcgtgttagccaggatggtcttgatctcctgacctcgatctgcctgcctcggcctcccaaagtggtgggattataggcgtgagccaccgtgcctggtctgcttggccactcttgtgcatttgatcttctatgtgaatcagtttttcaagttccatgaaaaattaccttgagattttggttgagagtatactgcaacagcaaattaattttggggagaattattattatttgagagagagtctcaaataataataaatctaataaataataatctgcaaataattgcattgtcccccaggctgagtgcaatggcacgatttcagctcactgcagcctctgcctcctgggttcaagctattctcctgcctcagcctcccgagtagctgtgattacacgtgcccactgccatgcccagctaatttttttttttgtgtgtgtatttttagtagaggcggggtttcatgatgttggccaggctggtgttgaactcctgacctcaggtgatctgcctgcctcggcctcccaaagtgctgggattataggcatgagccaccatacccggcaggtattgtttattatattgaacctttccatccatggaaagtgcagggtgtttacctgcatttactcaggtcttctttttttttttttgagacggagtctcactctgttgcccagactggagtgcagtggcgcgattttggctcactgcaagctctgcctcccaggttcatgccattctcctgcctcagcctcctgagtagctgggacaacaggcgcccgccaccacgtccggctaattttttgtatttttagtagagatgagggttcatcgtgttagccaggatggtctcgatctactgacctcgtgatctgcctgcctcggcctcccaaagtgctgggattacaggcatgagccaccgcgcccggcctattcaggtcttcttttatgttcttcaggaaaattgcatagtttcctttataaaggacttgcccatttctcactgggtttctttttgtattagattctcaaagtgtggactcttctctggtccctcccttctgcagcaacttcacccttacggatagcctctgctgctcccttttccttatacaatttattattttccatttgttcctaacttgcatcctgcacgtatttccatctgcttagctgcagggtaaatccctgaagggccaggctggggttttaattcctgcttggggagtggggcaggcacggagctgggtggggagggggtaggatctattgttaacaaagaagggaaaaggaggagaggaggagtgagaggtcccagggtctcagagcggggaagaggaaggaggccaaggcgggcggatcacctgagtttgggagttcgagaccagcctgaccaacatggagaaaccccatccctactaaaaatacaaaaaattagccgggtgtggcatcgcgtacctgtaatcccagctactcaggaggctgaggcaggagaattgcttgaacctgggaggtggaggttgcggtgagtcgagatcacgccaccccactccagcctgggcaatgagaatgaaactccgtctcagaagaaaaaaaaaagaaaaaaattgaaaatagggtcattgctgatgtaattagctaaaacggggtcattagggttggccctaatccagtatgactggtgtcttcataaaagggggaaatttggacagagacaggcacgcgtgcagggagaacgccatatgaagatgaaggcagaggcccgggtgatgcttctacaagccaaggagcaccaaaggttgccagaagctaggagagcctggaaccgagtcaatgttgccaacaccttgatcttggactttgagcctccagaactaagagttgtgcaagcccccaagtttgtggtactttgttaggtactagcaaacccatacactgtgataggagaaggaagccttgtgtgagtttgatactgactgggaggttaggaaggcttcctagaggaggagaagctgagctgggggtttcaaggatgggtagtttatcaggcaagaacattccaggcagagtgaagaacacacgcaaaccccaggaggcacagtgtacatcagagactcttccttgaacttttctttcctttttttttttgagacagagtcttgctctgtcacccaggctggagtgcattggcatgatcttggctcactgcaacctctgcctcccaggttcaagtgattctcctgcctcagcctcctgagtagctgggactacaggcgtgcgccactgtgcccagctaatttttgtatttttagtggagatggggtttcgccatggtcaccaggctggtctcgaactcctgacctcaagtgatccacccgtctcagcctcccaaagtactgggattacaggcgtgagccaccgtgccctgcttttttcttttttttgagatggagtcttactctgctgcccaggctggagtacagtggcgcaatctcagctcctgcaatctccgcctctcaggttcaagcgattcttctgcctcagcctcccaaatagctacgattacaggtgtgctccatcatgcctggctaatttttgtattttcagtagagctggggtttcaccacattggtcaggctggtctcaaactcctgacctcaggtgatccacctgcctcagcctcccaaagtgctgggattgcatgcatgagtcaccgcacctggccctccttgaacctttctttgattttccctactgcctgccctgcccaaacatctgagacctggaaactcccttgctcgaagataacagaaaaattatttttaccaggaggcctcttggacccaggtggtgatgtgcatcattctcaccagcagggggtgctcacacacttgtaggtgaaggaagggtggctgggggcacaggtactgagcaaccttctggcatttgtcagggtccaagacccctgctctcagggacagatgcgcccagccctggagaagctagggtggacagccctgtgccggcctcaaaggacacacagcaccttgggaggacagacacccagacacatggccctccgtacaagtattttatttccattacaatagtgccacgccaaaactacagtagctcaaaacataatacaaaaaatagattcccagctcccaaccccacgtccacgcacccacagagaagccagccctatggctccccaggcctaaggggaggggtctcacttcattttccttaaagctctggagcgggtagtggcagtggcaggggcttccacccctgctgggcctgagccctcttcttccccaaccccctgccggccccggcagacctgagccatgagtgtggtctccattccctcgggctgcacccccagccctaggacacctgcctgtgtccagggagggggtccaagcccatggtgctggtgctgacactacaggaccaccaccctccacgcggaaggcaggagggtcgggggaggggaggcagaggggacaccatggctgggagaagcccgcctctatgtggcaaggggactgcggctggcttctgcttcagctacttctcgggttcctgtctcctctgcagagctaccaggactgctgcgtgctgggaccaggacctccatctggaatccactctcgataccctgcaccagcttggaggcagatcccaaggtggcaggggtgtccctgtgccgtctgcttcctctcgggcaggaggattccagcttcccgggtgaggggagagcactgtccaggcagggctgggccaggaggcctgggctgctgaggcgggaaagcggtggctgtggagggcacgtgctgcccccacctccgtctcggggcctggcttccccactggatggcagaggccgctccaggtgcttccacttggtggcgcccatgagtctgctactggagaagctgtggtctcagggaggagacagacaccacaggccagactgggtggaggaatcttcccctcacaatgtcccctggctaaaagcatccatctagctgcaagtactatcttgattcaacccaggggccgacaatggactgcagcccagggtaagtccagcagttttgcagtcttccgatgccctgtgccatggacctgccggccagagctcctgggctcccgtggaggttagccctgcaggcaccggggaaatggggctatggcctgtgcttcagtcaggacacctgggggctgcactgcggaggccaagggcatctaggagcaggggctgtctccttggggtggagactggcggctgcagcctcagataaggcactagaggactggactggtcctgggagccaggcccagccatgtggtggatgacggtgctcagagagaggatttgggtcctgcgggaggtgacagctgtttctcttttcttttttttgggacggagtctccctctgtcacccaggctggagtgcagtggcgcaatctcagctcactgcaacctctgcctcctgagctcaagagattctcttgcctcagcctcccgagtaactgggattacaggtgcccaccaccactcccggctaatttttgtaattttttttagtagagatggggtttcaccacgttggccaggctggtctcaaactcctgacctcaggtgatccgcccacctcaacctcccaaagtgctgggattacaggagtgagccaccgggcccagcctgttttctcttttctcctttccctggggaagagggttggccggacagaccctggtgtggctgggatgggggactgctgcagagaggtaacgggcccctgagatagacatgggacagcccgaaaaggtgggactgagaggggacacttgtggccagcagtgtatctctgacacagtctcaccccgcagggctcctgcagtctcgattcagggtgcttggtgttcccagatggtgtttgagggtcctgacccgacctcattctgctatagccatcagtcccctgctgtggctttggggatcagaacttcccagctagggctcccactgttggactcaggggacggaggcaggctagctgaaggggcagtgcccatgagctgggccccccgcagagcaggctcctctctctgcctggcctccacacctctactggtctccacgcccttgcatgaggtgacaggagctgaaatcacacatcccaggggctgaggcagctgtctgatttggagacttgctctgtggcccagggatccgtgcctcagcccagcctcacagggagtggggaagagagggagtaaatcagtggggcttcccttgtccacaggttatttagaaaaacagaacataataaatataccaattctttccttaaaaaaaaaagtgtttaaatgtgtttttccctgaagatttccagtgtattccacagtgtttaaaaaatagtttccccaaaaatatatcttgaaagcatttgacacagtggtatttgtggcgtatctggcgcttgtcagtgtggggcccaggcctgatgagccaccagcccagcacccgaatgcctgctgaaggtggcgcacacgtgtgcctgggatgtccggctcttcacaggggatcagactgcgggtcacgttgagagccaacaccatgggctcggttccggctgaaaacccgccagtgtgaggaagcagggccccgggtggccaagcgggctgagcaatgccctggaggctggatgggggtctcgtcctcagccccttcccctcctccgtcttggctctctccgcttcgtccttaccagacttcgcacttgtgaggcgggttcatgggtgagccaggtgggcagcggaagtgttctgagaactccttggaattggagagggagccgatgacccggaagcgagaggggctgtggggatcggtgatgaggccttcgtgggagctctcaggtgtgcggacggagcaccagacctttgaaggggcaacagggagaggccagggtcactgtggggccctcgggctgccagactgcccccattataacagcaggggaggccaggtgcggtggctcacacctgtaatcccagcactttgggagccaaggtggaagggctgcttgagcccaggagttcatgaccagcttgggcaacatggcaagaccccatctctacaaaaaattaaaaaaaaaattaaccagggatggtggtgtacacctatggtcccagctcctggggaggctgaggtgggaggatcactggagctggagaagtcaaggctgcagtgagctgtgattgtgccactgcattccagcctcggtgatagagtgagatcctgtctcaaaaagcaaaacaaggttgggtgtggtggctcatacctgtaatcccagcactttaagaggccaaggtggcggtggatcacttgaggccaggagttcgagaccggcctgacaaacatggtgaaaccctgtctctactaaaaatacaaaaattagatgggcgtggtggtgcgtgcctatatcccagctacatgagaggatgaggcaggagaatcacttgaacccgggaggttgaggttgcagtgagccaagatcacaccattgcactccaggccgggtgactgagggagactccggctccaaaaaaacaaaacccagaaaatacaacaccagggagataagccccccacctgatcctgagatcccggggagtcaggagggtcccctgagcgggtcaggaagagacagtgggctggtgtagggctggtgtgccaccccccatgccagcagcctctaacgcagttgtctccaaactgttctccttcagccagcgcagcatctctgaggcaactgcattcgattccatctgaacaaaggactgtgtccaaacaccagttggaaaagcttggatttagtccagatctctcatttcctgggcagaacaaattgtctaatggcctggtagctctgagtgccagcagaaggctaccagatgaatgccgactgaagggatgatctgggatgatcacagcaagacagaatcttgctatgttgcccgggctggagtgcagtggcgtgatcttggttcactgcaacctctgcctcccaggttcaagtgattctcatgcctcagcctcccaagaagctgggactacaggcagccaccaccatgcctgactttttttttgtattttttcatagagacagggtttcactatgtggactaggctggtctcaaactcctgacctcaggtgatccacttgcctcggccgcccaaagtgctgggattataggcgtgggctgctgtgcctggctggtcatcttaagtttaagaaacctctagaaccctagaaccagaagggccctgggtgatcacctcgtcttctcattcaccagatccaggaatcccttcactggtactttgggcccttccgtgcatctctctaatgacagggcacatgtgctgtgcacagtccagtgacttgggaagttctcaatctgtggggaacttgcctttcggctctctgggctcttgaaacatcaagatggcagaatgtaccatgtgtggcatgttttcctaatggactcacctgtgcaaagcccaggaagaagagctggttattggtgaggcccagggtggggagcgagtgctcagccccgttcttcttcacccagttctggtaagcctgggaggagagaaaaccaaagctcaggggttcccatggcaggtggtgaaggaggggactggtatggaggtctcagggagctcccccgtgttggggcaaggactagtttctggggatctgggcctgggctcagcctaggggagccctcttcttgatgtgcactcgtttagccctatggcttaaaataccttctacgcactgatggctctcacatttacaccttctgctccagcctcttccctgatgtgtatattcaactgtgccagctggacagccaagatgcatctcaaacttaacatggtataaacagagccacatcgtgtgtgtgcatgcacacacacacacatacacacaacttttcccatcatagtcaatggtaccaccatccatcatcccaggccccaaacccagaacgcttcttcaattcttctctttctctcagatcaaacactgaccactgctccgctcccccttcccattgctctaccctgtctcttgcctggacaacctcacaacagctttctaatcagtcttctgactcaggctgattcaattccattcccctcctggcaaagcaacttcagtgaaccttaggaagcaggtgctggcaaaccttttctgtggatggccagagagtgagcacattgggatttgtgggctaatggtcaccgctgcaatgactcaattctgctattgcagcatgaaagcagccacatggccgggtgcgatgactgacacctgtaatcccagcactttggaaggcccaggcaggtggatcacctgaggttaggagtttgagaccagcctggccaacatggtgaaaccccatctctactaaaaatacaaaaattagccgaggtgcggtggcacatgactgtaatcccagctactcaggaggctgaggcaggagaatcacttgaaccaggaaggcagaggttgcagtgagccgagattgcgccactgcactccagcctgggtgacagagtgagaccctgtctcaaaaaaaaaaaaaaaaaaaaaaaagccacagacatggaaacaaatggagccagctgcaacgccaagaaacttcatttacaaaaacagcctcacagctagattcggcccatgggctgtaggtgtgctgactcgtttttgtttttgttttttttggagacagggtcttactgtcacccaggctggagtgcactggcacaatcttggctctctgcaacctccacctcctaggctcaagcgatcctcccacctcagcctcctgagtaactggaaccacagatgcacgccaccatgcccagctaatttttttgtatttttggtagagacggggtttcaccacgttgcccaggctggtcttgaagtcgagcttgtgatccacctaccctggcctcccaaagtgctgggattacaagcatgagccacggcacccagaggactcttgttttatttttatttatttatttttttgaaacagagtctcgctctgtcacccagactggagtgcagtggcacaatcttggctcactgcaacctctgcctcctgggtttaaaagattctcatgcctcagcctcccaagtagctaggattacaggcatgcgtcaccacacttggctattttttatatataaatatgtacatatttctgagatggagccttgctctgttgcccaggctggagtgcagtggcgcgaacttggctcattgcaacctccaccttccgggttcaagcaattccctgcctcggcctcccgagtagctgggattactggcgcctgccaccacgcctggctaatctttgtatttttagtagagacggggtttcactatcttgggcaggctggtcttgaactcctgacatcgtgatccacccaccaaggcctcccaaggtgctgggattacaggcatgagccaccgtgcccagccatttttatatttttagtagagatgaggtttcaccatgttggccaagctggacttgaactcctggcctcaaatgatccgcccacctcggcctcccaaagtgctgggattataggcatgagccactgcgcccggctgacccctgttttaaagggtaggttgaatcatgtcattcctctattttaaaaccctatattgtgtctctctatcataaccaggacaaaaccaaaggtccttccttagccgcagccgacagaagcctggagtggtctggtccccgcattccctacactctgccctgcccttcttcccatccttggacgtgccaggcttgtgtctagttcgtggcctctgcacttgctcttcctcttgctgagaccattttccccagcttttcccaggctcttcctcatcatttaggtctctatgcaaatgtcataaccccagagaaggcctgccgtggccagcgtcctccccattattccttttaccccccgttattcctcattacttcgccccagtttatattcgtcaccttttcaatagctgacattatcttacagatttatgatgtatttatttgcctttcttccccttccagcctccactaagagtataagcttttagagagcaggatgagcttcaaacacagcccctgctaggtagattctcaatacctttcattgactcgtggactttaagcaacctatccaaggtttctgggctcagtgtgcttatctgcaaaacggggattataatacctaattgtaaagctgctgggaatactccaagcctggcacttaagaaggcctcaataaatgacagctctatggatttctgctcttactgccgtggttgggaggaagccctgtcttaatctctctgacagacacctactgtttttctctcgtggcctctgttactaactctcccatctgactccgcgagcatctctgagtgtctctctgggtcagcccgtgtctaaatcatcttgttttatcttcccaacaacccaataatgcaggtagtagctaatcagagccaagtcaagtgaggctcaaggaggttctgtgacttactccagaaccgggacttgaacccagaactggctccacgaccagtgctccttgccctggctgcttagtcctcaggggcctcccagacccacagctggctgacttggtggtagcttcccctgcagagatgagaacaggcaggctcttcaggcggatgaagcccgagccccttcctgtgtctttgtcaggccagactcagagcacaaagccttctggtgccaagccctgtggtgggggagcctccacggtcggcatcgcgattggtcctcgccacccccaatttcgcagaagaggaaacggaagctcgcacggctgctgcgcctgccctggttgtccgtgatgatcctctacggacaggcatctggaaggagccagcactgggaccgtgcgcgtgtggggagcggggctctcacccgataggccgccttgagacccccgttgtcggcgatgttctcccccagggtgtgccgcccgttcaccggctccccgttcacgctgtagttgctgtactgctctaccatgcactcggtctgacgcttgaaggcctccacggatgagttcttccaccatggccggaggttcccgtccttgtcatactcccgtcctgtgggtcagagggaggcgtcatgtcaagggagggaggggcacagcagggacctgctgctcctccctgctcctggtgagaagcggttcatccgtccacccccgtcctccagccaccatggggagacgaggtccctgtgagtgccgagggacgtggatgtggtggccagtcagaggcgggagaggatgaaggagagaaatcgggaaaagctccagcgtggcccgaggctcagtggggcttgctttgttttctttcttttttttttttttttgagacagtctcactctgccactcaggctggagtgcagtggcgcaatctcagctcactgcaacctttgcctcctgggttcaaggaattcttgtgctcagcctctggagtagctgggattacaggcacatgccgccatgcctagctgatttctgtttttttttttagtagagatggggtctcaccatgttggccaggctggtcttgaactcctgacctcaagtgatctgcccacctcagcctcccaaagtgctgggattacaggtgtgcgtcaccgtgcctggcttattttcaacactggctaagggcccctgaccctgagtaacagatgcctaggaagaggcagatggagccagctgacctaggatcacaagacaggcccaggccacccaggtctctgcttcttccatctccgcccgggagtgcccaaggaaggaggcaatgaggaggattttggacattagttggagaggagggactgattcaacgccccctgactgcagttggactggagaagtctctggagtggtggaggaatgtccactctctgctaaacctaataggaaccccaagagcgggacaacttccacgagcagggcacctcactacacacttcacacagtcctcccaatcaccacgggagggtggaaccatcacgctccttttacagacaagacatgggggcctggagaaatgacagcgcttgctaaacttcatataatcggcaggtggcagagcaaggatttgaacccagatccttctgcctccaaagctaagacccttagaagtgaaggatgcagaaagcagaggcagtggggcctggaagatgattggcccagtctaaaggggaccaaggaacctgtaccaggcagtggtgcaatcataatcatagttcactgtagcctcaaactcatgggctcaagtgagcctcccacctcagcctcccaagtagctaggactattaaaattttgccaccacacctggctaaatttttactttcttagtagatacaattttattttattttattttttgagatggagtctcgctctgtcacccaggctggactgcagtggcgcaatctcagctcactgcaacctccgcctcccagattcaaacgattttcctgcctcagcctcctgagtagctgggattacaggcacccgccaccatgcccgggtaatttttttatttttagtagacagggtttcgccatgttggccaggctgatctcgaactcctgacctcaggtgatccaccagccttggcctctcacagcgctgggattacaggcataatccatcatgcacagcctaattttttttttagtagagatggaggtcttgctatgttgcccaggctggtctcaaactcctgccctcaagcaatcctcctcttaaagcacggagattacaggcatgagccatcgtgcccagctggaattcgtaccttgatcatcaaaagcatgagtcagctcatggcccacgacgacacctatgccaccaaagtttaaggccctggagggaaagacacaaaggtagagatgatgctttgagaggagggcctctcactcttgctcaggtatgtgaccctcacttcctgggcttagagatatagcaaaattccacagggctctgtgtggataagggtgtggtcatggcctgagtctccagcaaggcccctgaagccagagggaggctgggcacagtctgtgtggtcagctgtgcctattgggcaccatgcgctgtgctagatgctctacagacctaactgtcctcttcagtcattgcgaaagcgttagcaatggtcgccattgaccagctctatttatgagtagaccaaggctgggaatgggtcaattgctttgcccaaggaccacacaatcatccaatagcagacctgggattcaaactgagacagcagccttaaccctccccactccccagctctgactgtgttataacattgtcagaggggcgtttccctgaggtagggctcttgattccatgagatgctcccaataccccactgtgcagggcttccagatctcactggagggaaggaaagtgggtgaggatgttgcttcctctgcaacatctctgacatctgcaacctgaagcactggggcaaagatcacatggtgagactggcttaggtcgtatgggccccagggctgggctgggggaaaagaattggggtaggggccccagaggcagcctacttgggtgaggagcgtgtgtagaatggtgcctgcaggatcccggccggaaacacaatctcattcttggtgggcgagtagtaggcgttcaccatgggcggggtcatgctccacctgcaagcaacacacatgcaggaggtctcagcacagggcgggaggcaggtggggacagcctgcctggagcgctgcttggggatcgggaataagggcattaaaaatgcagactctccttgaccccaggcccaagtgcacacaagtacaaggacatctacagaaggactgtttgttttgagacagggtctcgttctgtcgcctaggctggagtgcagtcgtgtgatcatggctgactgcagcctcaacttctaagcctcaagccatcctcctgcctcggactcccaaagtgctggaattacaggcgtgagccactgtgcctgggtgcaggactgctttttaggagaaaactagaaaacacctgactgtctataaataaggaatcagttaattaatgatgtcatatcacacggtggaatactgaggttcttacaaagagcaggaagggccattagattttgaaatatcagcacacagtggctcatgcttgtaatcccaggactttgggaggctgaggtgggtggattacttgaggccaggagttcaagaccagcctggccaacacggcaaaaccctgtctctaccaaaaatacaaaaaaaattagccaggcgtggtggcgcacacttgtaatcccagctacgtgggtggctgaggcacgagaattgcttaaacctgggaggtggaggttgcagtgagctgagattgagccactgcactccagcctgggtgacagagcaaggctatctcaaaaaaaaaagaaaaaagaaaagaaaaagattttgaaaagtcaccactgaagagtatctttttttttttttttgagacggagctcactctgtcacccaggctggagtgcagtggtgcgactgcggctcactgcagcctccgccccccggggttcacgccattctcctgcctcagcctcccgtgtagctgggactacaggcgcccaccaccttgcccggctgattttttgtatttttagtagagatggggtttcaccgtgttagccaggatggtctcgatctcctgacctcgtgatccgcctgcctcggcctcccaaagtgttgggattacaggcatgagccactgcgccgtcataatgattaatttcattacatctcaacccctgaatacaagacttttttttttttctttttaagcgacaagatcttgttgtgacacccaggttagagtgcggtggcatgatcatggctccctacagcctcaaactcctgggctcaagctatcctcccacctcagcctctcaagtagctgggactacaagcactcgtgaccatgcctggctaatttttttttttttaatgttacagaggtggagtaacattaaatccacatataaagcattctgcttctttcctggaaccctgttggtacttttaggatgactggtaaactatggaatttcagacgtggacatctggcagacattttctttaaaatgaataaagtgagcttatcacctcaaggaaaacaactcaagccatctgttgccaatgataaaaatatgagatttaaaaaaatgttgaagtttcaggctaaaattaaaattttgaaaaacttatattggccaccacaagtttgacaccttaccaataataatggaaggtttttctcaagaggtcagcagtgatattaacaaatgtggatttttttgctattgtatattggaagtataaccatttggaagatctgtaagactcagtgaaccattgttttccaaatgactaagacatgatgttacaaaatcacgcctgggtaaaagatccattcaaagtgcaggacagaccaatggaatttagtgtaacagagtatgaaagttcatgaaggctgggcatggtggctcatgcctgtaatcctagcaccttgggaggccgaggtgggaggactgcttgagcccaagagtttgagaccagcctgggcaaaaaaaaattacaaaaattccggccccggtgacatggtgaaacctgtctctacaaaaaatacaaacattagccaggtgtggtggtgtgcacctgtagtcccagctactcaggtggctgaggtgggaggatcacctgagcctgggaaagttgaggctgcagtgagctgagattatgccactgcactctggcctgggtgatacagtgaaaaaaagaaaaaagaaaaaaataaagttcatggatgtggtttcagattccatagtgcaattaacctttaaaaaattatcacttttcgagttttggtgtagtatcagaagaacgtgcacaagtaccagaaaagactattaaaatatccctcatccctccctttcccaactaaattcctatgtgaggcaagaattctcttttttttgaaacaaagtcttgttctgtcacccaggctggagggcaattggggtgcagtggcgtgatcttggctcactgcaacctctgcctccagggttcaagcaattctctgcctcagccacctgagtagctgggattacaagcacccgccaccacgtctggctaattttttgtatttttagtagagatggggtttcaccatcttggcaatgcttgtcttgaactcctgacctcgtgatccacccgcctcagcctcccaaagtgctgggattacaggcgtgagccaccacgcctggccaagaattctttctatatataaaaacaacatatggtaacagattgactgcagaatcagatatgagaatccagttgtctttgattaagccagacataaagaaatttgcaaaaagtaaaacgatacctctcttctcattaattttttgaaaatagttattttccataaaatttaaaaaaaatcagggccagtgcagtggcaatggcaccatcttggatcacccgcaacgtctgcttcccgggttcaagcgattctcctgcctcagcctcctgagtaactgggattacaggcatgtgccaccatgcctggctaattttgtatgtttagtagagatggggtttctccatgttggtcaggctggtcttgaactcccgacctcaggtgatccacccgccttggcctcccaaagtgctgggattacagacgtgagccaccgcgcccagcaataatttttttgagtgtagaaggatcccaagaccaaaaaaggttttgaaagtaatggtatatagtcatgaggtatttggcatttcaatgacttctctggtacagaggggaagggtgagtgaggagtgcagtgagatgggtaccacatttcctctaagagcctagacagtcactctgcctcctccaggtgagccccacagccatgggaacatactgagaactttatttattttgagatggagtctcactctgttgcctaggctggagtgcagtggtgcaatctctgttcactgcaacctctgcctcccgggttcaagcgattctcctgcctcaggctcccaagtagctgggattacaggtgtctaccaccatgcgtggctaatttttgtatatttagtagagacgggatttcaccatgttggccagattggtcttgaactcctgacctcaagtgatctacccgccttggcctcccaaagtactgggattaccggtgtgagcccccgtacctggccaagaactctatttatgtatttatttattttagagacagggtcttgctctgtagcccaggctggagtgcagtggtacaactgtagctcaccgcaacctcaacctcctgggctcaagcgcatgctaccacgtccagctaattttttaaattttttgtagagatggggtttcaccatgttgcccaggctggtctcaaacttctgagctcaagagatcctcccaccttggcctctcaaagcgttcgaattacaggcgtgggccgctgtacctggccatatggaggaatttaaaacatcatatttatattcaaataatcacaaatacttcaatgggtaggcaaggaaatttaaataaaaacattcaagctaagttaaaatacttcagataaactggcaacagagcctatgccatgttctgaaggtaaaagcccaccttcttgtacatagcggggtgtcctggttggaggctggaaatgaaggaaatagagatgtttgaacccctatagtccaccagggggcaccagaggcaaagagaagttgattgcacccttccctaagatttatcccaaatgtttgcactgaggaatggaaggaccttggactgaagactggaactgggctgactacatctaatttttttgaggagacagtttttttttttctttctttcttttttttcaggcagggtctcgctctgttgcccaggctggagtacagtggcatgatcttgactcactgcagcttcgacctcctgggctctagtgatcctcccacctctgcctccccagtagctgggactacaggttcgtgccaccacgtccagctaattttaaaaattttttgtagagaccacatctccctatgtcgcccaacctggtcttgaagtcttaggctcaagcgatctgcccacctcagcctgcaaagtgctgggattgcaggcctgagctactgtgattgacctgaggagacagtaataaaaaggacaaagaccaggtctcattctaggttatcctgatttaaggtcaggaagctgtattttttttttttttttgagatggagtcttgctctgtcacccagactggagtgcagtggcacgatctcggctcactgcaacctccgcctcccgggttcaagcaattctcgtgcctcagctactcactcctgagtagctgggactacaggtgtgcgccaccacacccggttaatttttgtatttttagtagagacagggttttgccatgttgaccatggctggtctcaaactcctgggttcaggtgatccacctgtcttgccctcccaaagtgctgggattacaggcgtgagccaccacgcccggccaggaagctgtatctttgaaaaagttccccagaggactctgatgtgcagtgagctttgggaagcacagctgtcaagcccatccagaaccttccccaggcctctgtgggctccctgtcctgagatcccaccattcgtggtagtgaggaacaatgggaaagctgctcttgctggggcctccttggggtctggcgctccccagaggtcctcacatttgactgccatgaggaccccagaaccagctcctcccatcctattctgcggaaaatgaaatgaaggctccaaatcccaaagcagtggagcggagacaaggtgccagatcggctccgctccagaggccaggctcaccctgccaacaggctgggcaggctcaagcccatcccagctcctagctgggccatacttcttttgcccttggtttcttcatctgaaaagtgggataacaagggcatccactcttcagacggctctcgtgatagctgatcgggtgcacagtgagggtgcaatgaaggccagttcgtcccaaggcttgcccacaggtggggagctggcaccttgccggcagggcctgggggaactcactgatctctgttgggggctttcctgagctgatcggcagtgaccctccatgagaagttgaaaaaccgcatggcattttcaaagtagaggtctggaactgcagtgtactagaaaagaagaagtggagtcaatcacagtgtgccctcggtggtgtgcatcttccaagacaggaagccaagggctgtcatggttaagagattaatctgcaggctggagaccggaatgcagggcttggggctgcagggtcagctcttctcttggccttcaccctggggcacgagatggaatgacaccgttgcaggatgtgcctacagcagtgcctgggcccaggcaagaaatatctcccatgttgtccaatagaacctcctgcgatgatggatgttctgtgctctatgcctgcgctgtccagtatggcagactactaagcatttctttctttcttttttttttgagacgggaatcttgatctatcatccaggctggagtgcaatggcacgatcttggctcactgcaacctccacctcctggtttaagtgattctcgtgcctcagcctcccagagtagctgggattacaggcgcatgccaccaagcccagctaatttttgtatttttagtaaagacggggtttcaccacattggccaggctggtttcaaactcctgacctcaggtgatcagcccaccttggcatcccaaagtgctgggattacaggcgtgagccaccacgcccggccactaataagcatttcaaatgtggcaagtgtggcttttaaatttaatttaaactaatttaagttttaattatttaaatagccacctgtggctagtagctaccatactagatctcataagtaaagtagaaatctatctgaactgtcaagggcatcactgtacacccttttcactactcggcccagctttctagctttttttctgcttttttgagacagggtcttgctctgtcgcccacgctggagtgcagtggtgcaatcacagcttgctgcagccttgtcttcttgagcataagtgatcttcccatctcagcctcccatgtagctgggactataggcacatgccaacatgcccagctaatctttacattttttgtagagatgaggtctcactatgttgcccgggctggtcttaaactcctgagctcaatcaatccccccacctcagccacccaaagtgttggcattacaagcatgagccactgcgcctggctcagctcttgacaggtgcaaaattctccctggttctggtgaaacgctggagcctcagggacaggacatggatcctgggctctgcccaggatgcctccagaggcccaaggatcttgcgtcatgacactctggagcatcttaaatgattctcaaggaaaaggcagcagaatgagtctcatgatctcagaatgagtctttatagtcttaggttctaaatataaccatgacgagaggttattagatttttaaatgcctgaattcaggctgggcatggtggctcatgaatatgagccagcctgggaggcggaggttgcagtgagctgagatagcaccactacactccagtctgggcaacagaatgagaccctgtctcaaaaaaaattttttcttaaatacctgaattcaagtatttcaatcacaagaagatataaaacttcataatttgaggcagaagcacaatccacctaactgagtgatttgccaaaagttctaataagcagggatgtatcaaccacctccattgcccaaaccaagcttaaaaatgcacctggatttaagctgcttctttcccattagcatttcaaagtcaaaatcagaggtccgggtttctggggaggtggaggagggccgcagggacaggaggtaactggaagcacgaccagggagggaggaggtggtgtgggggttttcccacttcataccccacccctgatgtctgagggccaccaattctctctgcaccttctggggtctgtttcctccattatttcccacatattaaatggagctgaccacttccagggggcacacagcacgggttctgtactgactggtgggcactgctgatggatggtggctatggggaggcagggcctccagctgacccaggagccaaattaagaagaagaagaggcttcctcatgcctgacccatacccaagccccacaccacatcatccctgtgtgttttgacaaccatgctgcctctagcaccccatctggacccagccctgcctcggcccttttctaagggggcatttaggaacgcaagggggcagggcagcagctactcacgtcattaaacactttgtccagctccttgggatccatgatgaagttggggtatcctatcatgttgtagatggcatcggcctggacaggacagacagaggaagtgagtgcccggcaacatcgaccaggccagcctgagcaacttgggtgctgggctcatagtctgggccaaggggaaccagagccaggccctgcctgccttgggctttcatgtctttttctggaaaggtttcccccttgcaaaacttctacttatcccttaggtctctgtttaaatgtcactttcccaagggaagtcttccctgactcccatcccactggagggtgccagagccttcccgacccacgggacgtgctgcgttttcctgcaccttttccccgtacactcagcgaggtttgtcttctacagacatccaagcaatcatgtgcttgaggcctaccccgaatcctgctaggcctagaccgctcacccgctgaaggcgagacagcatccaggctgtgctgccggacagaactggcctcaccgggcgcggtggcttatgcctataatgccagcgctttggcaggccaaggcgggtcgatcacctgaggtcgggagtttgagaccaacctgacccacatggagaaaccccatctctactaaaaatacaaaattaaccgagcgtggtggcgcacgcctgtaatcccagctgctcgggaggctgaggtgggagaatcgcttgaacccgggaggcggaggttgcggtgagccaagatcgcaccatagcactccagcctgggtaacaagaacgaaactctgcctcaaaaaacaaacaaaaaaaccggcctctccttcccccaccctcctctatctgtgctggacgccgcagcaccccctccaagtgcctggccagcctcaccttttccttggctgattttcgggtttcctcatccatccacttcagggtgctcaggctttcctcaaatgccttcttaatctccaggatgatctcggtggcctgaggagatacacatcacagcagtaaggtctgcgcactggtctcaggtaaatgcaacaggcaccccgtgcagaacaatgatggccagagattaaactcaattttccaagcgtcaggctgggtgagaaggggagccacagctgtgcttccaaaccacgctcctaacgtgaacaccctgcaagacaggactggccttccacacacagggctccatgctccaataagcttaggatgagcttcgggaaagttggaaaagtctctgctgtggtacttttcagagcctttaatatggtaataataggcaccgtgattcttccagagaggggagaagacacagcctctcccagccttattgccttattggaccacagcattcctttttgatggagcgggctttaagatctagagtactcatgttccgaggagcagcttcggaaataccatgctcaggctggatatagacaggtgttcttgagggagacaatgtcatgagcagacaagctcgaagatggaaagttgaaggttctagagaaggggaaggcagagctgtgcggcaacaagagcagaggggccagcagaccccaactcagaccctgcccagctgctcacaggccagtcactgtaatggatttgaattgcggttggctcacctccggctgcagatgacagctacataatgaatactatttgtcatcaagattgtaacaataaaatgaccactcccattagctgaacccttattgtatgccggtgcccagtgtgtggcatctcatttaatctctctctgtgggaggaatgcccccgtctccacattgcagatgatgtaagaactgtcccaggccacccgaccagcggtgaggccaggatctgagcttaggccgggctgtctccaaggcgctctgccatggcactcctctgcctgtctagaacaaacctgtcacccacaaaataagaaaaatgtcaccctctgggccagagctgttctgccaacattctctctgggtcgttcacagcccttggaggtggggatggctgtcacagccttgcaggctgctgggaggatcacatgagctcgtgcagataagggcctggcactgaagagctgccctcgtgagactcccattacccagggctcgaggaagtgaagcctctgcattgaggctgtggccctaaggtcccctgcccaggagcaggaaaggcccagggtgggctggagtgtgaactggcaggtctgtgcaggccacaacaagtgtgacctcacagcctgtgtccacggggaaggcacttactatgctcttgctgtcctcggcgaaggttgctttgacaaacatggggcccaacgcaaagcccaggttgttttctgtgtcactcacgcaaaacttccagcgaggaagacaggtctggaaaacacaagtcagggggctcgctgggccccagccctttgtttcccaacccctttcttgctgggaggtagcaccatgtggggcccatgctttgttctggaagttcagggagagctttccgacccagtaaagttattttagtcaccggaccaagaggccactgataccctcactcccaccccctgccatttcctgaatgccaggctctgtgctgggacttcacaaatagtgtcccgttgagccattcaatgaccctcggggcttacaagccgtttgactgatggggaaacacactcggcacggagcagctgctggcccagggtgccccacgagtgacaagtgttgttggaatgagaactgagacgtgcctgactccacatcctatgctcctacctacccccatctcgtcctgcctcctgggaagagcaggagtcctggaggcaaagagcggtggagagtgactggtctaccctgagtcacagaaaaaactgccccagggccagggctccaatgccattgaagatctcctcaaatgagaacaccacagcaacaccgcaggacttttttctttttttctttttttttggcagggtctcgctctgtcacctaggctggagtgcagtggtgcgatcacacagctcactgcagcctcgacctcccaggctcaagtgatcttcccaccttagcctcccgagtagctgggacaacaggtgcaggccactatgcctggctaattttttctatttaaaaatttttttttttttttgtggagacatcatcccactatgttgcccaggctggtctagaactcttgggctcaagtgatccacctgccttgacttcccagagtgctgagattacaggcgtgagccaccacacctggctcaccgcgggattgcaatgccttgattctttcttggtcttgcctacaagccccaacagtccatacaacccctctgtgcaaaccggaaataggcgtctgtgggctgcaacctcctgggcatggcccagggacgcgtgctgggctaatgtcagccccagtcactccccggccaggcatccctctgtggacagtatatatgaccacgtgtggtggccctgctcacataaatccctcgtacgacagaggaagtgatgtcctcttaaccccaaagaacaggtggttaacaaccacccacgctcagggcagtctgattcatcatggccctaaactgacaacagccaaaatgcccatcagcaggcagacggatcaacaaaatgtggtatttttatacagcaacatactacttggcaacaaaaaggaatgaactagctactgatatatacgacagcatggataaattccacagactcaagctgagcaaaagcagccaggcacatcgtgtataattccgtccacacccagctgcaccagccttgggggctgggggctgacaggaaaggggcatgagggtacctgctgctcagagggcgctggacaaatggatgatgggaatgttctctatctttctaaaattttttatacatttttttctttcttttttttttttttagcatgctatgcccaaggcagaaggggatattctctatcttgactgtggtgatggttacatgggtgacttcattggtcaaactcattgaggccaagtgtggtggctcatgcctgtaatcccagcacttcgggaggccgaggcaagtggatcacttgaggtcaggagttcaagaccagcctggccaacatggtgaaaccctgtttctaccaaaaatacaaaaattagccaggcgtggtggcacatgcctgtaatcccagctactcagaaggctgaggcaggagaatagctgtaacctgggaggcggaggttgcagtgagccaagatcaggccactgcactccagcctgggtgacagagcgagactgtctcaattgaaaacaaaaacaaacaacaaacaaacaaaaaaggccgggatggtggctcacacctgtaatcccagcactttggatggctgaggtgggtggatcccctgaggtcaggagttcgagaccaccctggccaacacggtgaaactccatctctattaaaaatacaaaaattagccgggtgtggtggtaggcacctgtaaccccagctactcgggaggctgaggcacaagaatcgcttgaaccctggggatggaggttgcagtgagctgagatcataccacagcactccagcctgggtgacagaataagactctgtctcaaaaccaaaccaaaccaaaaactcactgaactgaatacttaatgtacactgcatttttattgtatgtaaattatgccttagctacaaaaattccttctaggcaagaaagaaaggaagggccactcttcttcttacccatgttctttttagttttcccaactacgtgtccatttggatgccttgccctcagcctttccctccctcccgcgcctaccctccctcggctgagaagcccaaagctggacacatggtctgtgtctggccgaggccgaccacacaggatgtcaggacgagggggactctaatttgaagctccgtggaggctccaggctgtgagggctgaatcacagacagactttcttatgtgtcgtcttctctggagattctctggataaacccattccttcacacgagctttcattcatttacgcatccagcgttctgtgagcagttgccctgcatcctgactgtgctaggtctttcgaagctagagatgaatcaacagtgagcctgtactcctgggtctcaactgaaatgcccagaacatccagtgagagaaacagacatgtaattgcaccatccacagcagtaatcacagtgaagtgtagcagtggagtgagagcgggccctactgcatatactgctcacagtaagattctcctgcctcagcctcccgagtagctgggattacaggtgcccaccactacccccggtaatttttgtatttttagtagacacaaggtttcgccatgttggccagtctggtctcgaactcctgacatcaggtgatctgcccgcctcagcctcccaaagtgctaggattataggtgtgagccaccgcacccagtctgtttctttttgcagataaaaaactgtggcacagagaggttaaatcacttggccaaagggatcacccagggagtaagtggttgaggtgtttttttttttttttttgagatgcagtcttgctccgtctatcaggttggagtgcagtggtgtgataccggctcactgcaacctctgcttcctaggttcaagcaattctcctgcctcagcctcccatgtagctgggattacaggtgtgtgtcactacacctggctattttttgtagttttagtagaggcgggcttttgccgtgttggccagggtggtcttgaactcctggcctcaggtgatcccaccagccttggcctcccaaaagtgctgggattacaggcatgagccaccgcacccggcctgaggtggaatttgaactcagaaagtccggctccaatgtcttccttcaaagaggccacgctctctgcctacaggtcacgaagtcctggaagtactacaggatggtgagaaaatctccaaaaggagcgagggtctgatcgatctgaccggtcaggaagcctgcatcttgcaggagatctatgagtcaggtctgggaagatgaagagcagccaggcagcctcctccaccctgacctggctgcaattttttttttaacctcttcctcactgtaatacaaggagcactcagcaaggggttccttcctccctgctggaagtctcaagtcacaaatgggtgatagctgatgagaaacggctgcatgcagcgcttgagcagtcagaagagacttcacagggatcccctcgtctaatcttaggcggcccttggataagcaaggcagggatctgttacccctttctacagatgggagattgagcccctgccccagtgaggcaatctgcctaaggtgtgattagaagaaacaattcaaacttggatcttctgactccaaattccatgccgtttcctcacagcaggctccctccctgccaggatgaacaaacgcacacaccacactgcttcccatgctctatgctttttcccgaatgaaggccattcacaaaagtcctgtgaggtgaggtcaggagtgatctccaattgcagattaaaaaaactgaggctcagagaggtgtaaggactacccaaggtcacacagctaggaggtggctttgagttgggctgaacacaaggaggagggacctggcctgggcccagactctgtcacagttggggagtggggagggctggagattaagaaacaggtgagcagcagccttcacccatcagccctggggtatccagagacccctgctcagaccctcccacttcagggttcccacttgcccttgcctctcttgaggcctccctgtgccccacttgctccaagtgccatattcaagcagcaccctgtgctttgaaggtggcccagggaagctcactccattactgactaattaattaattttttaaaaagtgatggggtcttgctctgttgctcaggctggagtgcagtggtgcagtcagtgatagctcgctgcagccttaaactcctgggctcaagcagtcctcctgcctcagcctccagggtagctgggactacagacatgcaccactgcgcctggctcagaacttttttatcttgcaaatctgaaactctatactcattaaacaataattcctcatccctcttcctccatatcagcccttggcaaccacagggaagcttgaccttaacttttggttcctgcagagcagaggctgagtggtacagagctcagggctatggaatcagataggctggatttcagagcctcctctccacttataagcaactttgaacaagtccctttccctcactgagcctcgatttcatcatctgtaaaatggaagaggataacagcggtagtaggaattcataatgcctataaaaggtagatatccaataatggtatctttggttattatcatcattatgtaagtgagtagctgaaagtgcctcaaagttgtaaatatcagatctgggattttcattcaagcttgctgctttcttttttcttaaaataaacacataaatatattaaaaaaaaaaaaaaaacagagacaggatcttgctgttttccaggctgggctcaggtgatccacctgtctcggcctctcaaagtgttagcactacaggcgtgagccaccacaccaggcccttgctgctttcttgctgggtgactatgaaagtcccttcacctccctgagcctcagtttcctcatctgtaacctgggaaggtgagagaatatgtgggtgtatgttccacacacagaccatctttggaaccatcatcctgggtcctgatcaaatctctctgtaggaagtcccctgggaggccaagttctgcagggaacagaatcctggctttggccccatctctaacccagggccagtccaaggtagatgcaggaggagcaggaaggcaagttggccaggcagggcagccaacccactgctcccgctttgtcctctgcagggcagtatgcttcttgtggccaaggtctggtggtgcccttggaagtgcctctggttagaaatggggcttgttcccagctaccttctccctcagtccccttcctgccagaggtaggtttgcatggggatgggagagaggacgtgtaggatgcattccagggctcgaagcaggagcccacatcctgccattctctgccaatcctcatctggattggactctgggaagggctgcaggagtggggtccagctggagtcagctctgcctcctctctggggaggattgttggggtcttgctagctgctgtctgggttggggaagctgtgccaggtgagcttggcacaccagcctctactgctctgtagcggggcctcttccagccactctctggggcccgagcgtgatgtatcccatcagcacatacgagaactggtcatttcctatcacctccctcagccggtgtgggctctcggggtacagaccccagctcacctgtctcagtattcccgtactgggcttagagcctggcacgcgatggcaggagttcaatgagtaaccattagtcggctgcatgagtgagagggtgacagccacttccttggggagaaggtggaagtggctgtggaactttccactgggggtaggttcccctgtgggagggcagggaaggtccctgaagcctttggaagaatggaccctcagggctcctggcaggggcatttaacggcaggtagagcccacctggcctggggtttcccagaatacaaactgggaggaaaataataacactgaacagtcgcgtggtgcttctaaggaccaggtgctgttctgtgttttacgtttccggggaagaagtaatactattggtggtcccctgtgcaaagtggggctaataacagtactcacctcacaggcattgtgaggatcatgagttgttcaaggggagcatctatcatcactactggcaactactttttgctataaattggctgagtggctaggactcctctttaccctttacttggcataagcactccttccggaagcttctacccacccccagctggctgaggtcccttcctgtgctcccatagacaccttggcataaagtaggcgctcagcccatattcaggcatacgcagtagcaggctcaccttcttggtcccgtacatgacttccatgaacttctcatcggcgtcctgaaagcgctggtcaaggaaggagcttgttttccgcaccaggttccagatcatgtagttgttgagcaggctgcggggagaggaggccagagaggctcagggacacctaggcagggaggattgcggcccttcccctgctggcccctagggggctctcaaacttggcctgtgaccccaggccccttccagcctgcgggggcttggtgggttactgctccctaagcacgtgcaatgtaagctcttcaagggaaaagcctgggtcttctaccataggaaacgcttcagtgttgagtgcagtcacttgtataccacaggtgctcaataaatgcttgttgcctagctgctctgtgtctggaagctatgaagccccagcatggagacccaccccaatggtgtatgctacagggctgggctggagaggtgactaccacttctacagcttggaggtgccccagccagaaggccagagaggctaagaatagcaggggcaggaaaagaagctcagcccagccaggccaagctttccatgatgacagctcctactgccccacctgcagggcacagggaacctatctgtagctgttgccaccgttgccaagaagtcaccttgagactgtagtgaacatctaacctctaatcagaatcaaccaaaatgcctgataatgagaaggaggaagtaaagaactgtatttgtacacgacggagtactatgcaaccatgaaaaatgatgtttgcagaggttttgagatgacaagggggaaaatgttcaggatacaggtcaagggaaaaggagactagacatttagttatgataatgggaaaaaaagaccacatattagaaaaccgatctctctttccctcctctctcctgccctcccccatgctttctctctacatatgcacacacacataccacaagatcaacaggagtcatttaaaattttttcagagcctggtgaggtggctcacacctgtaatcttagcattttgagaggccaaggtgggaggattgcctgagaccaggagtttgagaccagcctgggcaacatagtgagaccccatctcattaaaaaaattttaacaagtaagtttggggagttaggaaaaaaataagttaaatacgataaatttttttccctatttttttggtagttttcaaaaaattttttaaaaattataagtattgctgggtgtggtggcttatgcctgtaatcctagctctttgggaggctgaggcaggcagatcaactgaggtcaggagttggggaccagcctggcaaacatggtgaaaccccatctctactaaaaatacaaacattagccggtgtggtggcaggcgcctataatcccagctgtttgggaggctgaggcaggagaatcatttaaacctgggaagcagaggttgcagtgagttgagatcgcgccactgcactccagcctgggtgacagagtgagactccatctcaaaaaaaaaaaaaaaagaaaagaaaagaaagaaaatcgtaagtattaactaaaaataatagccaacatttactgagtcccagtatatgctaggcactctattaaatcacctcatatggattgtttcacttgattctcacaacagccctaaatggtaggtgctaggtttttttgtttgagacagggttttactctgtctcccacgctggagtgcaacagtgcaatcacagctcactacaacctctgcctcctgagctcaagagatccttccacttcagcctccctctcaaggagctgggtgacaggcacgcgacaccatgtctggctaattttttattttttgtagagacaccgtctcgccatgttgcccaggctggtctcaaacgcagggactcaagggatcctcctgcctctgtctcccaaaagtcccgcaattacgggcgttcatgcccggccacaggtgatatttgtatcaccattttatgaaggaggagaatgaacttaagaaaggttacgaaatttgcccaaggctacaaagctggtagtttgaaagaggctgggatttaaacctgtgcctgtaaccaggatgtcctgctgcctctcgtaaaagcccgcccaggtcccactctcctgagtcagactgtcatccccacccctgcccacctgcccaagaagagggctgtctgtgagaggcgtgccccaggccactgggggtcctcttaccatctgtcggtggtgttgatgagagtggagatctgctcaaggtattccttgtcatagaccacaataggctcggattcattgatctccacggggtagaagatggtgttgagaaaaggcaaccagttgatggcgggtgccaaggtctgcaagggaaaaggacagtgtgaccctgtggggctgctcctcctcacagcccagggctctaggacgggcttctacaggaagcaaaggaaagagcttgggcttggcgccatctgacagcgcaccgggcagagagtcaagcggagcctggcgggcttttgtcagagatgctgtaggtagaattctaaggagtccaacaccaaaatttaacctgaaatggaatgaggatgcaatgagaagatgcagcagctgccgctaccattcagcaagcgtctcctgtgtgccaggagccgtggcaaatgattgatgcatatgattccacctggtcctcacgcgagtccaagcagtaggtactattatccctgcttcatggatgaggagactgagctttagacaggcctgaaacagttgagcttgtagactctgcagccaaactgcctgggctcatcttctagctctcttccttgctagctgtgtaaccctgggtaagttaatgcatccttctgggcctcagtatcttgtctgagaagtggggatcaccataataacagaacccacttcactgggttatttgtgaggactgaacaagcttatgctgtttgttctattcaacatgggattctgtaagtaacatcagtgaacttctacatgattggtaaattcaggaagacagcagcataacttctgagctgcattggtccgaaggtgatatttctcaggcatgggatcgggaagggttgaacattaactttcagcaagaaaggaaaagccctcagctcagctaatgcacacagcaggctggtcagctctactttttttttttttttgagacggagtctcactctcttgtccaggctggagtgcagtggtgccatcttggctcactgtaacctctgcctccagggttcaagtgattctcctgtttcagcttcccgagtagctgggattacaacaggcacccaccaccatgcccacttaattttcgtatttttagtagagatggggttttgccatcttggccaggctggccttgaactcctgacctcaagtgacccgcctgcctcagcctcccaaagtgctgggattataggcatgagctaccgcacccagcctggtctgctctattttaagatgactgaaaatgagcgctcgcgcctggggcttcctctcctcacagaggcgccttccagacctgtaactctcagcctccagcaggttgcactttctctgtgaccctaaaggcgcttgttcagagctctctttttcttttcttttttttttgagatggaatcttgctctcatgtctaggctctagtgcagtggcgtgatctcagctcactgcaacctccgcctcccaggttcaagcgattctcctgcctcagcctccctagtagctgggattacaggtgtgagccaccactcctggctaatttttgtatttttagtagagacagggtttcaccatgttggtcaggctggtctcgaactcctgacctcatgatctgcctgcctcggcctcccaaagggctgggattaacagcactttgagccaccccacctggccagagctccctgtcttatctgcagggtcttggtgtccacagctagcatttcccagctggtgctttccccacggcagcctccagccatgctgaggtactcctcaagtttctaattattgttttgttaggattctgattacaaagttgcgcaacttaaaaaaaattgtggtaccctttggaaggccgaggccagtggatcacctgaggtcaggagttcaagaccagcctggacaacatggtgaaaccctgtctctaccaaaattacaaaaattagctgggcgtggtggtacatgcctgtagtcccagctactcgggatgctgaggcaggagaatcgcttgaaccagggaggcagaggttacagtgagccaagatcacgccactgcactccagcctgggcaacagagcgagactccatctcaaaaaaaaaaaagctgtggtaaaatacatataaaattcaccatcttcaccatgtttaagagcacagttcaaggacaggagcagtgactcatgcctgtaatcccagcactttgggagactgaggtgggcagatcgcttgagcccaggagttcaagaccagcctgggcaacatggtgacaccccatctttacaaaaaaaaatttaaaacttagctaggcatggaggtctgagcctgtagtcccaggtgggagaattgcttgagcctgggaggtcgaggctgcagtgagctgaaatcacaccactacacttcagcctggttgacagagtgaaaccctgcctcagaaaaaaaagagcacagttcaggggcattcagtccattcacactgcagtgctaccatcaccaccactatccagccacagattgcttttttaaattatttattttgttttgagacacagtctcactctgttgcccacgctggagtgcagtggtgcgatctcagctcattgcaacctccgcctcccgggttcaagtgattctcctgtcccagcctcccaagtagctgggactacaggcacatgccaccaccttggctaatttttttttttttttttttaatagagacggggttttaccatattggtcagactggtctcgaactcctgacctctggtgatccacccgtcttggcctcccaaagtgaggggattacaggcataagccaccgcgtctggccccacagatttcatcttgcaaatgtgagactctacccatcaggcaataacttcccactggccccaacccccactcctggaaactaccattctactttctgtctctatgaacttgactattctaggtacctcatataagtagaatcaggcagtatttgtccttttgtgattggcttatttcgcttagcacagtatcctcaagtaaagttgcataacttttgttctgctcttgttctattttccccacacgtactgctatttttagtgtgcgattttacagaacacaaggttttttggaattatatatactgctacagcaaaaatgcctgtacatgtcgatcacttagatggatatgtctggcatttagcaagcaactcatcaatattggccattacaatctttgttcaaggtctcccatgtatgttcctgggcctgtccaattccaaattctcttttgttttcttgaaaaaggacaaaatgcaagacaaaggaggtgagagaggctccacatatggccttcacatggaaaaatcaatcaataaagtaaaattgatctgtaatgtaagaccagtctatagcctgttggtatatactgatgacaccctctgtgagggaggtagccataaacccccgcttaacagatgctgaggccgggcgcggtggctcacgcctgtaaccccagcactttgggaggccgaggcgggcagatcacgaggtcaggaaagggagaccatcctgactaagagggtgaaaccccatctctactaaaaatacaaaaaattagccgggcattatggtggacgcctgtagtcccagctacgcgggaggctgaggcaggagaatggcatgaacccgggaggcagagcttgcagtgagcggggatcgcgccactgcactccagcctgggcgacagagcgagactcagtctcaaaaaaaaaaagagatgctgaatttgcagatggggtaaggtgactttcctgaggtcacatagttaactagccactgtggaggtctaaaacccaggttcactcatctctttgggtttaaaagggcaactcagctgctggggaacaaggacctcaaaggacaggtgaatttgtgaggagggcaggtcctgaaggcagtggcgtgctggtaaacagttaacaactgcgccgggcacggtggctcatgcctgtaaatcccagcactttgggaggccaagacaggagaatcacctgagtccaggagttcaagaccagcctggccaacatgatgaaaccctatctctgctaaaagtataaaaaaattagccaggcgtggtggtgcacgcctgtaatcccagctacttgggaggctgaggcatgagaatcacttgagcctgggaggcggaggctgcagtgagccaagatcatgccactgcactccagcctgggcaacagggcgaagctctgtctcaaaacaaaaacaaaaacaaaacagttaacaactggctctcagtttctgggtaactcttcccaccgtggctgatggtaaaatacctgcggagctggtaagagatgtgcgcagcggacttgggggccagggggctccagtgcatccctgccagctaggtgagctgggaagagccacttgggctaagaatgagctaagaatgagcagacctggatcagcatccccaggaggaaccagctctgggacctccagcctttttccgttctttctctaaaaaggggaaaacagcctcccctcccagagctgatagatctgtgcctcttatacctgcttgcccaataaccctgagtttcttttctctttaccttgtcctctctgccctcctcctggtaggaggccctcaggcaggtaacctctgaggctaatctttaacatttctgtgactacaaaaactggagctgtgcttgtgagatcctcaaatagggttccaccattagagccacctgactgcatgacctgttggcaaaggccttgggaaaatcgacaagtttacaaactgtcagtgtttacacagtggacgagagctccataaactgcagacaactggaactctctgatcaaggtacagatataagacggtgagaaatccctgtgtactcttcaacacaaccctggccctttagggaaagcaggtgttctgtgcagggaagttcccatgactgtcagataagatgtgttgaataccaggattttcacattttccatcctggctgctttagtgaactcctatcttaaacacatgtgcctagctccatctccatggagacggctgttttaactgactaggacattccacttgtgactcacaccctctggggcacaccagtgagctccattttccacacctgcagccaaggagtactgtgggtcacaaaccaaccaattcaaataggtttgaaactgggagagaagagaagaatgcttctgagcttcatctcagctggagaaatggggtagaaaatggggctcaggcccaaacagcctttggcgtgagggtcctagaaaggaaggggaaggtcctcaggcccccagaagtaatggaagagtgtctgattcacagctctgagttcagactctgctggggactagcctggaagcattctgtaccccagcagggctagcctagaaccacactgtgaaacctggcgtgcttttccctaagttacctggagtatgggaagaaaaccccatttccagacaccagggaacaagacattctctgtcccagagtagaatgaatcaaattgatttagtgctgggttcctgggtgacatcgctaataacaaaggaatagtaacaataatgatgaatataatatgttatgcttgtactgggttgtgcaaatgagtttactgaatgaactctcatcctttacctcaacttattctccaacaaccctgtgtggcaggccaggaagagattcttacttagaacacaggcttcagggggccaggacttctttattattttattttattttattttattttattttatttttttgagacggagtctcgctctgtcacccaagctggagtgcagtggtgtgatcttggctcaatgcaacctccgcctcctgggttcaagtgattctcctgcctcagcctaccgagtagctgggacaaccggcgcacaccaccacacccggctaatttttgtatttttagtagagacggggttttaccatattggtcaggctggtcttgaactcctgacctcaggtgatccacctgcctcggcctcccaaagtgctggaattacaggcctgagccaccatgcccggccaggacgtctttaaatgtcagacataattttaaaaatatgcatatatacccatttattctgggagatagtccatggtttttgatctgttctcaaaggactctgtgacttaaagttaagaaccacaggccgggcgcggtggctcacgcctgtaatcccaacactctgggaggccgaggcgggcaactcacgaagacaggagatcgagaccatcctggctaacacggtgaaacccggtctctactaaaaatacaaaaaaattagccgggcgtggtggcgggtgcctgtagtcccagctactcgggaggctgaggtgggagaatggcgtgaacccaggaggtggagcttgcagagagccgagatggcgccactgcactccagcctgggcgagagcgcgagactctgtctcaaattaaaaaaaaaaaaagaaccacaggccaggtgcggtggctcatgcctgtaatcccagcactttgggacgccgaggcgggtggattatgaggtcaggagttcgagaccagcctgaccaacatggtgaaaccccgactctactaaaaatacaaaaattagccgggcgtggtggtgcctgcctgtaattccagctactcaggaggctgaggcaggagaatcgcttgaacctgggaggcagaggttgcagtaagctgagatcatgccactgcactccatcctgggcgacagagcaagactttgtctcaaaaaaaaaaaaaaaaaaaaaaaagaggaaccacagtcccttgtgagggcaagggctatgtctcatttgtgttctggcacacagctggggtgagtgaacgagccaagcccattttacaaggaaggcagccaaattcacattagaatttaatcagaaatatctgtaaaaactcgagagaatccatatatttcctaaagatcttaattgaactttgggtacttagaacacagaggctgtttggccaggcgtggtggctcatgcttataatcccagcacttagagctccaaggggcttacagtcctctgaatctaagcccagggcttgtgtactacaagctgctgagtctgctaaactccccccaccttggcagctgtgcagctgggaggcaggaaaagcctttcttcctctgcttggaagaagagagcagaagcagtggtgataggatgcctggggggaacctggtggccatgctgggctgatgtgctcagggctcctgtgccttctccgctattcctggcacagacagttggcatcatggccacggtagggggctgaggcactgcgggggcccctcaggctgagaaatcggctggaacaaaccaaattataatgcacaaacaacatcaccctcagcctcctggcctcagagcaggaaaagagtgccagatggtatctaacagcagctgttgatctccatcctggtctgagcagcaccactgagcctcaggccagtttctctgggagctgaagggcagccagcaccagcaggaggccaggctcccctgaccctgatcgtgggccctagcacggcctgcatctccgcctgggacacccagttggcctggaaatgctcatctatcgttagactcaccttccctgacttctccccacccctggctcccagggcccgctgcttttgcccaaagcactcagcaatgagacagggttgtttctagctggtgtcccccactagccaggaagcacatgaagcgcaaggtcccaagacggacccatatacacctgtcagctggaggagggtaaagggcagggacctagtgttcttcctgaaagtagaaggaacggacaacaggtcaaattcggctggtcacaaggtaaggaaggagggagatgacactctgcgggagcccctcctcagcagagaagcaaggcctggccacgcattcctgggtgatgtcaagaaacggcaagatcggtggtggccattctgctgatccctctgcaatgccagctgatgctctggaaagaaggaaccagcaagctattctctctggaccctcaagaaccaagcagccaccagagggcagcctttggcagaggctgagcccttggacgttgggcttctccaatgggtgacagagagcatcacagatctaacgccctgttgtacagtgagcccatctgcggctggctcctctgccacttaggagcctccggaccttgatctggctcagaaaagggaaaagtaatgacagaatccacaccatgcatttattaagtgctcactgtaaccaagttcgatgtgcttggtgctggagagactggaaaggcgctgtcaatgtaagctggtgtggtcatgaccccgagcctccaagtaaacactattaattacagagaagcagcctggtgtcggccaggcgcctattttggagtcacttactagctgtgtgcccttcagcaggtaacttgacctttctgagcatcagtttttccatctgtggactgggcataacaaccatccttcctttgtcacatagtttcaaggactagatgaaatgagtataaaagcccccagtccagggccctgtctgaaacctggaggccatcccagcctccctagcagccggcgctcaagttacctgcagctcggctgccgtcactttgtggtagatgagctcctcatcacggcgcttctcctgtgggatggtgatgttggccagtgccgtctcaaagtccaagatctgctgcatctggggccggatggcctcctcgtccccgccgcccagcagcttccccagctggaccatgtagttcagatatccggtcagcacctgcagggcccataccccaaactgtcagtggctgcccccccactatccactggacgagagttggtggggggcttggccagccaagtccggcacagggagccagggggctgcacagtgcccccaagacacccgtggggccaggtgtggtggctcacgcctgtaatcctggcactttgggaggctgaggtgggtggatcacctaaggtcaggagtttgagaccaacctggccaacatggcgaaaccccgtctctactaaaaatacaaaaattagctgagcatagtgggaggtgcctataatcccagctactcaggaggctgaggcaggagaatcacttgaacccaggaggaggaggttgcagtgagcccagattgtgcgccatggcactctagcctgggcggcagagagagactttgtctcaaaaaaaaaagaagaagacacccgtgggagacacagcattgagaatgatctcggggccgtgtctctctgctgcttccctacagcctccaggagaaagcccaaagtcttggctcgtctcacaggtccccacctgggctggtccctgtcttccagggcttgtcctggggctgtctttccattcttagaatgcatcttttctgaccaccccccacccgtgttccaagatctgaattaggtctccacggtagactttctcagcttcactttctcttagttaaataatatccgcctcgccgaccaaaccacaggccctgtgggacgaaggctatggtggtcttgtctgctaccatctccccagcatcaggcactctgtgggcgcttggtcaagtacatgccggcggaaggatgaaaggacagatgaatgagttccaggtgaggtcgccccaagaggcatcacaagaggcaggccagggggagggagagccatgggcttcggagcacgtggatccggatgtgaatctcaggctcgtcatttactggctatgtgaccttgagcagatcacttagcatctctgagcctgataccctcttctgtaaaaggcaagacaaaactaattcctgtttgacagatgaggcaaatgaagttcagtatctgcagggttaatgggagggtcacaggtgatgtataaagggccaggcgaattgtggtagctgttattgctgcctctgcctctctctagaaccaggacaaatgatacctgtctcttgccccttgtgtccatgatgcctgagtgacacagccagcctaggggtgtccctcccctgccagggtctgcctgtttcacccatcaggtcactgacacccctgggctcccctagcttcaaagacctgcacaggtgtgggtgtggacacggagcaggaaggaccgtgctgggaggcaggctgggaggggagaggcacgcttaccttctcgttttcagttttgttcaggtaatagtctctcgagggcaagcccaggccagactggtccacctggcaagagaagcaggcatgagagggaattcgtgttgcaatgcgtgtatccactgcacggcctcctgccctgggaatggctggcacatggcagcagaggcccagctcaggcccttggagaagcaggactgctggctacagtcactgagaagcccactcagggacgggatgacacattcctgcctgtccacgtggcccccccccgcagggctcctgggctcctcagaagggctggacagagccaccctcctttttaaacagctacttgcctcggcaaagtgcctctatctccccaacgctttccaggtggttaagagtcactcaaaagctgtgtgatcttggccaagttactgaacctttctgattctcaggtttcttctcaggtaaatagggaaaataaaacctaaccttcagagctagaatggggattcaagaagacagtgctggtcaagtgcctgccaagcaggaggggagggtcaaattctgcttgctactattggcacccatggccacatcttggcatacctaggacaggtgttattgcaatccatttgatttataaggtaactgtagctctgagaggttgaggcacttgcccaaggtcacacagtgactgaatggtagagatgggctgggaactcagcttttaggacccccagcctgggtttctcacttctgcattggaggttggggcagaccagtgctggagctcccctgggcaggctgagcctctgtctggggcatgctctgacagggagagatggattcaaacccattccaagaagagttacaaagagcagacgctaaggagggggaaaccaggatgtgggttcagctgtgcccaggagttgacatcattcttggggcccacggaaacccatcagcacccaaagtttcacctgtatgcagtgcccatctacgcaaggccagcagcctgcaaagatctcaccagtggggcctctggaaataacccaggctcagaaactagaagaccgccgtcccacccagggcaagcccctctcccaccccaggtcctgctaaactcaaaacaggaagaggtcgtgcccgccccctcgaccgctgcaggttcaagctagctcacctggatcacgttgctgttggagttcttggaatcggcactgacatagacagagaagaagggtgaggtgcggtagtgggcggtgaccacctgcagggtgtcctggaagttgtccttggcccagggacctgtgatgttccagcccccgagctgtggggagggagagcaggcagggaggtgatgaggtggcggggagacccagatgtgaattctggttctgccgctgacttgctctgtgaccctggagcagtcgcctgacctctctgagcctcaagagcaaaggaaaggattggtcttcatcgggggtttccgacccatgagctggagacccatggatggagcaaaggcttatcctagacaagccaagcagccaggcatgaatccagccgctccctgggtggctgggatgagaatgggaaagagacttttcccggttcacggtttatattttggataatgaattgtgtgaatgtgattatatcaaaacataaattcaattgtgcctctgggataaaaaaggctccacatgtttaagaaggttggtaaattacggtctactttagtctcaaagttgggattttaaaaaaattttttttgagatggagtcttgctctgattcccaggctgaagtgcagtggggccatcacaactcactgcagcctccacctcctgggctcaggtgattgtctcacctcatcctcctaagtagctatgactacaggtgtgtatcaccacacctggctaatttttaaattttttggagatggggtcttgctatgctgcccaggctggtcttaaactcctggcttcaagtgatcctcctgcctcagcctcccgagaaagttgggattttaaaaaatctccctggtcttccctggtttggcacatgggacctgtccagagaggaggggactagcatagtccccagcgcatgcagccaccaaccctgctgcaatgctttcctggagccaagctaagaggcagggctgtccagggaacacgaggcaggcagaaaacatccacagacacctactgtctgcaccaggaagcctcagagtctgggaagtgcccaagaaagcaagaaagatgtcttcccctgctcaggagtaagcaggtataggagagtggcctgggtccctgctcacggggagggctctggttctgggccaagactctctgtgggtctttctggaacaggcacacacccctccacacacacaaacataacccctgaggaaaaaacagcagcaacgtggaggaatattttccctctaaacatggcccccatcccacacacagatgcacagagagacacacagacagatgacagacatctacaacagatgctgacacacactctcacacaaacacatgcacagacaacccacccacgcagctacgcaatgtgctcacactcacatgtgctctcgcacactcgctctctctctttctgtctttctcttggtgctaccggctggacgtatgaggtgggccagtggtaccagaaggctggagtggaagccagggggcgggcaggtggcatgggccggggcttggggagggagagcccgaggcactcaccctctcaatcaactccattagaggtttggccctgagctcctcgatcctggtctcgttcatgcacgcacggtagtatacttgcgcctttctctctgcctcgctcacgctggccgtggagttttctggaacaacagacagtggagtttgcaatgcggccccacttgcccactgggtggctttggggcagtccctcttttcggagccttggtgttctcagctgcaaaggagctctgacatctgcctgtcggagtggcagtgaggaatgccgtcaccgtgagtatgtgagggcccctggacagagcctggcaagctgaaggcgctcccgaaattttgctgactgcaaagaaaaagaatcgaccacgtttctctccctctgccagttgggttcacagacgtgtccccgggttgaccgcacgtgcccaccagcaggacagtgttcttcccctgtggataacgtgtggtacgaacacccctgcctggtgcatgggacagaggccggtcttggttttcagataccagatgatctttcttgtgataaagactgaagttggatggaaactcaaaaggctcattcattatgaatttactttttgcttcctccttggaggggctaggcacgttcaccaggcttacagccaactcctggggccgttttccaccgcccttgccaactccagcaagcagcatctccctcctgcagtggcttctcagaccttaccccagacacccggagattctgttcccttctccctcacctcagtgccctggtccagatgccacctgctaaaggcaatgctccggtgggtgcacctggtgaagatgaccgcttcctgccactcaggtccacaagggacccactatatactggggctctgtgcatgagccttcttctcagagccctgctccaggccatgccagatactctaaacccctcaattccatctgtccctcttgcctcctctgggaaactcactgctccagacacattccctcatttcatgttcatttctctctggccctgaagccccttcctttgcctccttcaaagatccctcaaaccccagctccttcacaaagactttcctggcagaactgtatccatccaccctctgaccagatactagatgcttactctatgctaggccctgtgtaagctgtgggacacaagagaaaacatccctgtccccaaggagcttctgcatgggaccctgttaaaatcctactcaacctcaaggcctctacggggacatctttttgatgaaggctctcctaagatgttcattcccaaaggccctcaccgctctgcatacctgtgtccaccattagaccgtgagctccttgggacagaaagcgggtcttatttatgcctataaaattcagagcccagccctgtgcctggcacccagcagaaactcaaagaaatgaccacaagacacgacagtgctatgaacaacgcacgtggctatggaacacagagaaaagtcactcccttcggaggggtggggagaagaggggtctccagagggcgttccatttgagctggttctgaaagctgaagttgttcaccaggtggaagggaggggagaggccactgggttgcgcggagcaggacaggacagtgtggggacaagcggggatgcctgaaagggcaggcggactgcttggagaaaagaaagctgtctggcgtagtcacttggagcaaaggacatgagtcacttcctggccagtctttcatcagctttcccagcctcaccccgagagctccctgccccccgatcctcaccataaatagcaccatggctttcactgatcagagcatcgagccccggtcttgctgacctcagggtgatggccctgaaagggggacgggaccagcttggggctagtctgaaggaagacacagagacaagagagccccttgagagacagggtcaggggcctgaacgaggggctatggagggttcgtacagccctggagaccatgggctactgggttgctaagtgctggaaacacctgcatgtcccccaggcaccacggcagctctgagaagaggactctgtgaggggagggcggaaatggggaagctgggatacagaagatcagggagagcaaaaggggagtgcctcgcccctcccaggggcctcgttcctatggcaacactcccaatgaagctcttggaagaaaaagcaggagaatcgtcattgctccccaggcctcagatgcagcgtctcaccctccacatctggctccggccaaagccctgaaatgccagggccagcgctggggaaggcactctgtgtgctctggcccatgagtgagcctggcatctccctcccccaaggccacaaagataagaggcctaaagaacagctcccaggagcagcctggctgtgctaatcacagcgagttccgaggccctcttccctaacacctgtctgcaagccccaaattatcaccgggagggagaaggaatgcctccttcagacacagcctcccttgctccttcgctgagaggctgccacaggccaggttcaaactccattcctttggcccccaccacctgggtgccacgctcacttgctttcccacattgtttacaaagttccttttgcctggcaaccgccaggccgggtgtgggggacagtgggcaacataactggaggcctgtccacgtgaggcatgcagcgtggtgagtgaggcaaacggcagccaaggactcgcgggagcatctgattacgcacggggtgaacgctgtgagaacatcccagaggccttgaaggggagggcgggaggagaccagggaagccaagcaaggccccggggaagcttcgtttgagcttcgggctgaaggatgaactcaatgtggagtagaagcaggggctgtgcctgggctgcccctccgccattccatgtcttagtggtccctgcagccccagaaccagccctggatagggacctagtaggcccctagcaacaggtggtggctgcaagaacagagcccagtgtccctttctggagaggaaggacatctggaagatgagagggtgatgaggccggatgcccacctaaggtttcctttttttatatttattttttttttttttgagacagagtctcgctctgtcactaggctggagcgcaggggcgcaatctcggctcactgcaacctccacctcctgggttcaagtgattctcctgcctcagcctcccgagtagctgggactacaggcgtgtaccaccacgcctggctaatttttgtatttttagtagagactgggtttcaccatgttggccaggatggtctcaatctcttgacgtgtgatctgcccacttcagcctccccaaatgctgggattacaggcgtgagccaccatgcttggccaagattccctttttttttttaaaggaaatcgggcaggtggggcaggagtggacaggatgagggggccccgccaggagttggtgttcatgccccctctgtgtgtgtcatcagtatccccactgccaatgctggctggggcaggagccctggtagaaggtacggttcctcttcctccccctggttccaggagcccacggggacaacccacggcacactctcccacctcttctttttcctcctcactcagggagcacctactatcctgcaggctccaggggacaagagcccaagtgaggctgccaggcgggaggctgctgcaggggaccaggtgagcaaaggtgggcgcttggccaggatggtggcagagaagggggcgagaagtatttggaacatgagagaaaggagagtcaagaatggagtcaagtttctttggcctgagtgagaagctgctgacactggggaaccgcagcctgaggatgaggggcaggcttaggaaggagcttcagtgcacacagctactgcctaaagctcagctccagacactcgaagtttgaggcctctatgagacacccaaggggagccctggtctggggagtctgtagagtgcattgtcttgaactccttttagtccaaataggcactggaatataccaattcccccccccccttttttttttttgacactgagtctcgctctgtcgcccaggctggagtgcagtggcacgaacttggctcactgcaacctccgtctcctgggttcaagtgattctcctgcctcagcctcccgagtagctgggattacaggcatcctccatcacgcccggctaatttttgtatttttagtagagacagggtttcactgtgttggccaggctgttctcaaactcctgacctcaggtggtctgcctgtctcggcctcccaaagtgctgggattacaggcgtcagccaccgcacccagccccaattcctgaaattggccagaaggctctatatcacgcatccccaacaggggcaatactgcccccaggaatttattcttgcaggacaaagcatctcacgctttttactctgtgtatacagactaagaatagcaacagacatccagagtacctgtggcattaacatttcatggaggcgtaatgataactgcaggctgagaaatgccaccctgggtgacggggtctgcgctcccacctgtctccagctcctgccccacactcttccccatggctggctggtctcttctctccttaactcaagcatctgctcagacatcccttctgagaaagcccatcccttcctgatcgctgcagctacaatcgcctcttccctctctggccccatgccctacttgatgtttttgagcccttctctttacaatcctatcatgtatttagtcatttatttgtttactgtctgtcttccctgctggaatgtaacttccacaagaaaagactgtcttattcctacataatccccagccccaagcaatgcctggcacacagaaagtgtctgatgcataattggtgagtgaataaaggaatgaatgacagagaaacgtagcactctagcctgcgggaggtgactgggcttcaaagtgaaatgagtggctcatgtctgtaatcccagcactttgggaggccaaggtgggtggatcacttgaggtcaggagtttgagaccagcctggccaacctggtgaaaccctgtctctactaaaaatacaaaagttatccgggtgtggtggcgggtgcttgtagtcccagctactcggcaggctgaggcacaagaatcgcttgaacccagatggcggaggttgcagtgagccgagatagcgccactgtactccagcctgggcgacagatcgagacttggtttcaaacaaaacaaaacaaagtgaaatcaggcacagacctttttctgaataagaaaaaggtctctaggactgtgccaaccctccatagcccctcgttcaggcccccaaccttgcctctcaaggggtgctcgtctcggtatcttttttcagactagccccaggctggcactgtcccctttcggggctgtcactctgagttcagcaagaccagggcttgatgctgtggtctcctttaagacacccctggctcatgtttacttcccagaagatttcatggaggcaaagaagaagccaacacccaacagtgtggctcctggcactatgctggggacacattttggagacagcagcacttctgcggcctccttgtactatgaagatcttttggcagcctagggccacacaacagagctccacactgcctgggtacttccttctaggggccccgagttccagaagcttcctcagtccctaccccaaagtcccagagaggaagacagagcaccatttcatcggccgcttcttcctctgggagttttcattggaatgccctctccacatcactcctcagggaggaaatgaacgcccaggcaggcagagctgtggggtatgataggggtgtctgggaatcccccgtatgctgctgggataggggtgtctgggaatcccccacgcgctgctgggataggggtgtctgggaatcccccacatgctgctgggataggggtgtctgggaatcgtgcggcctcccttgatgcagtgggaccatctggccaggagcctgtggggccctgactccacaccagggcaggaccagtgtttgttttagataaaactagactccgttcagacagtcacaggcctcaggagccccatcctgtgctggggggaaggggtgctgataaaggagacgccttgctctgcagaacaaaaataattccaccactgccaccgctcacagcatctacagcaggccctgtgctgctgtcacaacctcaccctggtcccctgaggcggatatcaccatcccatttcagagacaaggaaaatgaggcccaggtgcgtgaagaaactggcctatcaaggcagagctagcgggtagcatgctggacttctaagccttcctgagaaagtgaactgcttcctctgagatgggcataggcatggctgtgtgtgcatcttgtcctgaccattccacagtggctgttatcacactccatttacaagtaagaggttgggtaactcgtcctaggtcgcaaaagtggctgtggccaggactggagcctaagccttttctgcttccctgtcctttcctgcaggttggctcagaaaaccggaggtgaagctgaagcagcccagctggccctaagaagccctggacgctccctcccatcctcacatcgttgagtcaatgctattatttgaatgtctgtgtcccctccaaaattcatgttggaacttaatccttaaggagcagttttaagagatggggcctttaggtcatgagggctctgctctatgaatggattagtgtcttataaaagggcttgagggggccagttcccccctcttcagtcccatatgccatgtgaagacacagttcatggtgccatcttggaagcagagagcaacccttaacagacactgaacaagcccgtgccttgatcttggacttcacagcgtccagaacagtgagaaataaatttctgttgtttacaaattatccagtgtattagtctgttttcccactgttgatacagacatacccaagactgggcaatttacaaaagaaagaggtttaatggacttccagttccacgtggctggggaggcctcaccatcgtggtggaaggcaaggaggagcaagtcacgtcttacatgggtggcaacaggcaaagagagagagaggctgtgcaggagaactcccatttttaaaaccataagatcttgtgagacttattcactatcacaagaacagcacgggaaagagccgcccccgtgattcaatgacctcccactgggtccttgccacaaaatgtgggaattgagggagctacaattcaggatgagatttgggtggggacacagccaaaccatatcatccagtctgtggtattttgttacaatagcacaaacagactaagaatcaatcaatccacgtaaccattccccaaacaggaaggcagcacccactcctgtagacaccatactggatagaaagcattcatgatgcagatgctgtccatagatggcttccttccaatatgcgcaggaagatgaaactcaattagacagcaggtattaggaaaatatgtcaaaataaaaatacgagcgatgtcacagggtgacatgattaattgccacatcaccgacatggacacgtttaacgctattggaatattgtatgtctatctcccagggagactggaaggcagactgctagttttttctttatggaatctgtgttgcttgaattgtcacaatgagcacgcattgatttttttgtatgcgttcatcttacagtataaaatacagtaaagcaaacaggacaggtgcacacagtgtacttgtagctcaagcctagagaggccctttggtagccacagaagacaatggaggcagcaggtttgagaaaagtctcggaggctttggagggggtggtgtaggctctctagctggtagaataatctgagctacaagcacagttggaaagtccaaggcagggccaagtctaagggctgaagggcctggctgcttccttcctctgatgaagtgaggccacccactctcatctccccaaaacctacaaggacagcccatgctggccacttgggggagtggcagagtgaggtgcgaggcatctgtgtgtcctgcagctgaggtcagcatccccagctggcagactgccaggtcatgccacagtggcacctggcctagttcggcccacctgctacagaactgcctggattgcctctgaggagcctagcatgaattcacctggcagagaaatgcatggcttgcccaaggtcacacaagcagatggtaataactatcttgccggatcggctgacacaatccacactggcactctaaatgtcccttctcccctctccgcctagagggaagccctcgcctcagcaggtcagagtggcctgggcacctccggcttgttcccgtgcccatcagctctggctcccttccgacgcctgttggctgacccctttgtcttggagacgctgaacccagcctggccttaagcccaagaatgcactggcccacactcctgcatttttttgtcacccactcacctgccatctgcctcttcaggagtttccatgtatcaaagtcccaggtatcaagcccacaggtgaggggccatttccagactagttccgaggactgagccttgagggagaggaccccaggatatgtcttccggggaagcccctagtcagtatgacatgggggtgaccccagctcctgtgttcactggacctgggctggggcttggctggcctgggctgagaactctgtggagcagccgctggggaaaggaggcaggcgaaccacacttctcggctgctctccctgccagcagtgccgacccagggcctctccctgctgaatctgacagtagagtgagtagagaaagaatacaggctttgaggtcccacagctctgggtctaatcccagcctcaccatttcctaggaaatacatttccttcatattcatgagtctcatctgtaaaatgtgcaaatgcagcctactccatgagtttactatgagaattcaatgaaataatacaagtgagatgctcagtgtgtcatagctgtattctgcacctccttcctgacaactgggtccacataccagcgcttctctaataaataagaaataatgactttgttctttgcccacccaattaacccttagagcatccctactaatgagctgagtttcagttagttcccactttataggtgatgagccgaggacctaaaaatctgggtgacctctctgcagtcatacagcttgtttgtaagaagtctgggttggaactcacctaccaccaccaaggagggcagctgtgctttgacgagcacctactaggtgccaggctagtattccgatgtattccagtgctcagcactttgaaccatcccaggcaagtcaatactcacagtaactgtatgtgttaggaggcatcattatccctactgtacagataatgaaactaagtgggagagaagccaggtcacttgtccaaggccacacgagtgataagcagctagcacaccaggactgcttgacttcagaactctgcggtctggcctcctggtatcaccagaccttggcctcggggtcagggttgaatgcatgattttgggttgttccatggcccattggatgcagctccccacccacggcttgattgtcaggaacagtggggatggactcaatcttggctcagacctaaggttctcccagtgagaaccagccccagaaccagtcagaccagaacccacacaatgcacaagagcccattctgggcctcactgggaagctagagggcctgtccactgtcctgccccatcccctctaaatgctaactgctccccagagagtgagcccctcaccattttggactggtggtatatccttgacaaagtcacttaacctctgggagcctcagttgctgcatctataaaatgggaacaacaattccgaagtctggggttgtgaggattaaggaagcagtggctctaaagagcatggtacagtgcacagcgcacggcggacatccgtgtctctccttccttcaggccctcaggctctgcgccccctgcaggttcttgcaggcactgcggaaagggagctaatgtctgtcccttgtacctgaaggaggtggtgtgggacagaggaaagggcacaagaccaggcatcaagcaagtctcagctctgccactcactagcctatcatgaggacctctccggatctcgctttcctcatctaccaacagagtgagcaacaccttcccagcttccaccctgcaggatcaagtgggatggtgtctacaaaacagctctgtaacctgtcaaatgctgtgcaaaggtcaagggtgaataacagtagcatcaatacaaacagcagccaccacaacatgccaagcctaggcatggtttaaatacatttaaatgtatttcccatttaattttcaaaattcagaggaggcatggttcccactgtactcatgagaaaacaagccagggaggtgatgtaattgacccaagacctcatagtaagtggcagagtccagattcgaacccaggtcctggtgagtctgaagcagaggaaccgacccaccttgttatactacctggactatgggccctgccaagcccccagctgtgatgttaggcactggagaagggtcgtccttgagttccagtcttgcaatgatagacatatttgccttttaagtgtctggttctaaaatgaaaagctgcatgccctttcaaaggcactttggtggcataaggcaggcagggggacatctcagactggggctttgctgcttcggacatactgagcttcaaccctacctccatacacaccaccctgctcatcctcaggaagttaggctgaaggcagctgctgctgctgcttcaggagctgtcggaggccaggagaaagggtgggtgtgttttacctagcggcggctctgctctgtggggctggggcaggaaagaaaggaaaggtctccttcacctggtttgcctactttccctgtaatctaaaagacccagttgccttaaattgttaattgtccatttagaatcatttcctgtctcttaagattcgtgtccctttaagaagatctgtccccttttgggtatcttctattgtacctgcctttgaatatcttaaagttttttaaaacaatcagtatttgtcggatctaggttctgttgttgatggataaattgactgacttttcagaatgcagcctctcccagcatttagggtcccaggatggagcaggggacagcagcagagggagacagccatggtcccagctgtgggagggttaaggtgggcagctttatggtacagcacaggtgtcatgatttcacactgggggaggagcccagtgggcagacgggaatccaacaaacattaactaaggatacagctgcaaacaagacaacgtggagctctaatctgaggaaaaaccatcaacacaggggtgaactagaggtgcccaaggcctagtgaagtgcaaagagaactctgaccagagggcttatcgtgcaagcccgatcaccgtgaggctaaggatgattcccgcctacactgaataactaatcctctgataagctgttgttagaactttcattggatcacaaccttagaatctgatctagtgtgttcagtctcgatcccttttgctcataactttcaaaactcacagtcaatactagtcaaaagctacgccaagcttgaagccacaaaagtaacgaccacagccaccagttcttgtgtacaccctacatgccacacacaccatgctaatgctttacacatgtgctctctagttctcaaaactctgtaccttgggtcttattagtctcattttacagatgaagaaactgaggttcagagatatgtgacttactcaggatcatacaatgagtgagggcagacattctaacccagcttcacctactcccaagtctatggtcttccattctgccaggctcctcttttcttgttttttagacaagagtctcactctgttgcccaggctggagtgcagtggcgcgatctcggctcactgcaacctctgcctcccagtttcaagcgattctcctgcctcagcctcccgagtagttgggactacaggcgcacgccaccatgcctagctaatttttgtatttttagtagagacagggttttgccatgttggccaggctggtcttgaactcctggcctcaagtgatccacccaccttgacctctcaaagtgctgggattacaggtgtgagccaccgtgcccggcccattctgccaagctcctcctttaagcaggcgcagctgggaagctggctgggccagctgacagctccccgctgtggcccatttattggtctccatgctggatgcttaccgaggaggtgcttgatgattgcttggttgtgttcccagaggttgctgaaggtcccccagcgtgagtggccatcagggactgggttggccttgatccagcccccacaggcgtagctgaagaagtcatggcaggggtccactgtggggtccatggagctcaagatggagctggtcactgagacacaagcttcgctcaggcacacagagggggatcctggaagggttaaggacaagaggccagtgaagggcaggcagggaagaagcagggagggcagagaagggggcttggggcccaggggccacatgtcccaccctggccctgaccacacagatttggaactggacggtcactagacccctacagagaaatgatttccgcttataacacaagacttctactcagctgtctaaaatccttcctgtggctaaaaggtacccagaacccaggtgtttctcttaatcaaccttctcctccataaatattcattgactctttattattccttgatgctcaacaaatttattcattcacgcatgcattcatttattcagcaagataatgactaccttccaggttctctgctgagtatggagtgcgtgtgtgtgcatgtgtgcacctgcgtgaaagtgtgtgcccgtgcgtgtgtgcgtgtgtgtgtgtgtgtgtgtgtgtgtgtgtgtgtgtagggtactggggtattgggcataaaaaggcagagtcctttaatccaagagctaacaattcagttggggatatacacataaatcaaaatggaacagtaggagaaatgtctgtcctcctttctacaaaaataaactgaacatttactatgtgccaaaagggtgatgtagacagtatggatgacaggacataggaaggaggaaagcctattagaaatagaaggaggaaataggaaaaatcactcctacgtacaagcaggagagtgagtgacctcagggaatcctcaaaaacccaaaggctacgccaggtgccgtggctcacgcctgtaatcccagcactttgggaggccgacttaatcacagctacttgggaggcagaggcagaagaatcgtttgaacccgggagatggaggttacagtgagccaagatcgagccattgcactcaatcctgggggataagagcgaggagactggtttgccagaggcaagaggaaagggccagagccctgcctcaaggttggcggctgagctctcccaaaggacccaaagcctgggtggcctacgcagaggcctggcctgaggcagcaacatgaagctgactgtgcaggatcgagaatcacaggcccagccccatcgtccgtttacccaggctgtgctgatgaccaaagggactttactgaacgtggccgtgtactgggcactttgcacacattcaggatctcatttaactcattacaagtcatcagatgcaggcatcatgtccctagttaaagaggaaactgagggagtgaacggaacaaggtcgcccagctatgtgggagggcggagagctgagagctgggcccaggcctgtcttggtccagccatgccaaggctgtgtttttctgctttccttccccacctctctgccagtcacacgaggggctggtgcagcctgactgctgagatccgtttccccaccacacagggaggcagtgaggcagggtgggctttggaggccactagacctgggttcaaatccagctttctacgtttgccagtggggctttgggcaagtgacctcatcgctccatgcctcagtttatccatctaaaagttaggaagaaaggtaggaccaatttcacagatttcacagtgatgatggccatggctgggcacgggggctcagcttcctcaagtctcagggtctgaagtttcaggccagtctttagagagcagcaaagaacgcacgagctagtatgggcagtgttcccctcactcaggaacataaggccagtgggcagaggttcatttgtggaattagtaacatttgatgacaaacacatagtccttcagatgggtggctgacaaagggctcagagcagctgcacaacagcaggaaaatcagggtgatctgactttgagataatcacacaacaattaaaaattattgttcacagccgagaggtgtgccataaaaaaattatggagccattacacatgaaaacagagaaaggaaatggtgggggtgatggtgccattttaaatatctctaaatcaaatcatcttaatcacagttgcatgctccactcccaaactcggggaaggcaccagaatctttatggggcagggaaagaatttccatgtaggttgaaagagcctgttgagtattacgatataactccatacttagagaaggaaaagaatacctattgttttcacacatcgaaccacaggaaggaaaattttacaacatcttggctggtggagatgcccaggagacaggctgagagtgagcctaacgcgggaagacgcatcagaatctgtgtgtatgtgtctgtgtgtgagagagagacagactgattaattaactgataaaggtttttgctgttatcacacagggacttgggtttaaaaacaaaacaagaaactagtcccagaagtcagtctcagaggccgggctcggtggctcatgcctgtaatcccagcactctgggaggccgaggtgggcggatcacctgaggtcaggagttcgagaccagcctggccaacatggtgaaactctgtctctactaaaaatacaaaaattagccaggtatgatggggggcacctgtaatcccagctacttgggaggctgaggcaggagaatcttttgaacccgggaggcggagattgcagtgagccaagatcgcgccactgcattccagcctgggcgacaagagtgagactctgtctcaaataaataaataaagcagtctcagaaatttgagttcttcactaagtgcctactttgctggacattgggctagggacctacgaggtgcttaaggagcaatggcttgattatttaactatttaatggtttgcagaaacttcatgaaatattcctggcccaggaagtgcttcatgcattttgatgacctcatggtttccaggccccctcatctaaggccccctcttcctacggaaaccttcatcgacccccttccctctctgggcccctcagcggcctgggtgcctgctctgctactgtgctatgtcacgaccatctccttgttcatttctcctactagaatgtgaacttcagggcaggccaatatcctatgcgtttttatatttccattgtctagtactgtgtttggcaactagcagctgtttaatacgtgctttttttttttttttttttttttgagacagagtttttgctctgtcacccagtgcagtggcataatctcgactcgctgcaacctctgcctcctggattcaagcaattctcctgcctcagcctcctgagtagctaggattacaggcatccaacaccacgcctggctaatttttgtatttttagtagacacgaggtttcaccatgttggccaggctggtcttgaactcttgacctcaggtgatccacccgcctcggcctcccaaagggctaggattataggcgtgagccactgcgcccggcctcaatacgtgtttttgaatgaacaaccgaatgaatgaaaggccttattcagcacttgttcaccacctgcagaggcagcaaacatttctttccgttgggacatgcgtgatcaattgagaaagcagaaacagatcctagatttaatttacagacactcatctggacagcctggcctcaaaactgtgtagaatgctttctttaaaatatgttcttggagaatgtattgtttgttttgctgcctctgtttgcaaagcaccagcatgtttctggaaaggaagcatagcaggaaggtaagtaaacacgtactatgtgtccagacattcccagaggctggccttcagaatcatcagatttgctttctttttttttttttttttttgagacggagtctcgctctgtcgcccaggctggagtgcagtggtgccatcttggctcactgcaacctctgcctcccaggttcaagtgattctcctgcctcaacctctcgagtagccggtgtgcaccatcacagccacctgagtagctgggactacagttgtgcgccaccatccctggctaatttttgtatttttagtagagacggggtttcaccatgttggtcaggctggtctcgaacatcttgacctcaggtgatctgtccatctcggcctcccaaagtgctgggattacaggcgtaagctactgcgcccggccagatttgctttgactggcctgatgtttgctcagatgtggccagcaccagcacctgctcctgggtaatgaggttactgttaatatctggggtggtcactgctttcccaggtggctcaggggtcacctgatactctgcccagctccactccaggggaagaatgttcctctcccaggtccaggctggagaaaacccttctgagacccagagagggacacaacagaggcagaagcaggattcctcccaaggggccccactgggcaataacaacagaaatgttttgggtctgatcatcaggagctggcccgtggggactcccccctggtttctggtgaagacatatctttggagctccgaggggcagtctcagggtaacactggctgccggagtctggccagctcccgctgctctgagccaagagctgtgcagacgtgctggccagggtccacactgaccaggagggggttcagaactagagctgatttaggctgaggcgacatggcagtggcaggagaggatgacgagcttgtgtcctgttagcagaggaggcacaaacacacacacacacacaccaggacacgatcacacaatatacatacactcagcagagaaaggctgttcccagcctgatcttccttcctaccccttcgttcattcaaacattaatttattcattttactatctgcacacctatggcacaggcactatgctaagcacatctggttaagggcctgaaaactagtcattaattagtcaaatatgcattaagcacctgctgagccaggcacatttggtaaaacacctacaaaccattatagttaactaatcaagcaattatttcttaagtacaacctatctttgtggaatgaatgaatacctgtgtgccttacccaggagggatggaagaatgctcagatgaaggccctgctcttttctaggcccctgagtcccctccccaccccagcgcagcgtggccaccctcacagaccagcaacttcacagagggaaggctccacacagcctgtagtggatgttccaagatcctgtgaaagctcctaatctctctcatggggtgagcgaccgagtcagtgggtgggatgctgagcagagcccccagaggctgctcaactaggtgaaccatctgccatcagaagaatagatgttggggcacaggggactgagaggccctggctttggctaattccccattcttatttctaacttggatccaccccttcgcacttcttaagtgtttactgagcatcaactctgtgtgaggcagctggctagatccacttagttggaaacagagaaccagtctcagacccctacagcaggatcagagtggcccaattgtatcaccattcaaagtgggacaaaggcaccgatcaaggaacacgatgggcagctggatctggaagggcagctctcctgggggtgtaatgcgctctggagcgtacttggattacaaagggaggtggagcctgggcttgagcccagtagcctgtgggtgaattccaacttccgcattggattagcaagtcactctatctcagtgcctcagtttcctaatatggaaaaggggccaaaagtaaccacacttcacagggctgcctccaggaggaaatgagattgcatctgaagcgaggggtgtggtatttgggtatttggtccgaggaaataattcagtaaacagagggcattattgttattttattggaactagagatagcagacaatgtcagcctatgtgtgtaattaccccacattctagcaacaacagtacccagagctaaagttgaagaagtcctacgaggcaccagctatgggacatatgttatctctagtccgcagacccatcccccagttgggtactgttttcccatttaaattagagaagacacaggctgagggaataagtgacttgtccgaggtcacacagccagtaagttgctgggacaggatgtggactcaagtgcgagacctttatatcacccacgctgcccacttcccgggtcttggtctatctcagcacccagacccccctgggcctggctccctccttagcctcagagccctgccccggcttaagcagggaagcccccctcgcccgagctgacggagccgggtgcaggagtgagtcaagcccaccatgcaacacgaaggcacctacttgtctggtactggatgcccagtgctgccaagcaggccaccagtcctgccgccagaagtaccaccaacaccaccagccgcttctccacctgggtccgtgcagcccagcacctctggccactccgggggctgtggaagttcacctgcagggaaggaggcaggaggggcggggaagacgtgagccccgggccccgcttcccttggaggaaggggttccgctgcaggcccaggccctggagaggcatcagggctgcctcctgtctcaggggtggtctggttcccacagattcagccctaatccaggaaaggaacagccaccctgctcagctgctcggatctgctcccaaacatcagagagtcaagcagctcggccccgacaggcttgtttttttgtgtcactcgatatgagtggaaggaaaaaactacagcttttccctgtttctccagtgaggagttcaaaaaagaacaggatgtttggacttgcaggcatccagtgagtacccagctgggctctctgcagagcccccacatcagcggggtcagggacaagggtgacacagccatggctcacacttcccagaagcacagacatccttagctcattaaaccctcataatcccacgcaaaaacacgcgagccaccttgttatttttctttttacaagtgaggaaactgaggtccagagaggtgagaccctggcttctcaccacccagctgaatggggacagctgggattggaacccaaagctgttgatgcccgagcccaccagtggatcagaggtggatcctgggagatgttggcagagatgcaaggagaaatagctccattcaggtcctgaaagggaggaaaaatccctccagcctaacagtctagctaaacaggaagggaggcacaatgagaggaagtgcagggtgtggcagggccctccctgcccgaggagggacacaccagccagcagcaatgggggccgacagcccaggcctctcacacccaaggcagcttggggttctcctctgttccaagagatgcttcctgcaaaacccacacccacaagacaggaagggtctcctgaaggtggggtaacgtgttcagtgacaccgtgtcatgtgctaacagctgagcaccaactcagggccatgctggaaatacacagcccagcagggaggcagataaagaaacagactggggtgggcaggggttcaatcagggagggcttcctggaacgggtgatgtctggcctgggtcagtcagaataagtaggagctggccagataagaaggaatggaagtggagaggagaggagggcctagatcctaaggggcacagaaagccaggttaagagcctggacttcctcttgaggactggagtgacatgattagatttaccctttgggaagggcagggtggagggagcaaggcttgccaggaagaggggaagctgtcagggaagatgaggagactcagactctgacctgcaacggccccaccaacagcctgaggggtgcccctggtgccgggtcagagccctgagggagtcccaccctggcactcggggatctgaagtgggtcagttgagggaagggtactgagaagccacgtggccatggttaggtatttactgggcaggaaatgactgggaattgctgcaccagagatggaggaacacaagcactttctgtggaaaaaaaaaaactgggttccaaaactgagaaaaggggccgggcacggcggctcatgcctgtagtcccaacagtttaaaaggctgaagtgggaggatcacctgaggtcaggagttcaagaccagcctggccaacatagagaaaccccatctctactaaaaaacacaaaaattagccaggagtggtgacaggcgcctgtaatcccagctactcgggaggctgaggcaggagaatcgcttgaacccgggaggcggaggttgcagtgagctgagattgcgccactgcactccagcctgggcgacagagcaagactccgtctcggaaaacaaaacaaaacaaaacaaaacaaaacaaaactgagcaaaggatcttggggcttagagacacttccgtggaggcccaggaggctcagacactgaagcagctgggtcaggcagtgggagggatgccgcccgctcaaatccctcaagaatctcttctgaaaaagtgagcaatgaaagtttcagaccatgaattaaaacttcaggctgtgagggcctggtgcagagagagacagcctggtatgatgctaacatgtacactgtactcaaatgtttataaagtgctttttcagagtaatcagttatctcacacactttaccttggtctctggtactcagaggggtcccaaggacttgaagcagggactgccttgcctagggacactgacgtatgtgtcctgctgcccctaatttgtttcatccttcctcctttaggcttctcatgtccccattatcatggctcagctcacagggcacaaggaggccgtgagacagtgttttgttttgttttgttttgttttgtttgagatggagtctccctctgttacccaggctggagtgcaatggcacgatctcggctcactgcaacctctgcctcccgggttcaagcgattctcctgcctcagtctcctgagtagctgagattacaggcatgtgctaccacgcccggctaatttttgtatttttagtagagacagggtttcaccatgttggtcaggctgatc

SEQ ID NO: 32 - DNA, 1578 bp, Homo sapiens
gggctgcaggtttcgacccgcgctggcgagtcatgagcgccaagtttcccactggcgcgcaaacttgagttacttttgagcgtggatactggcgaagaggctgcgggcggtattagcgtttgcagcgacttggctcgggcagctgaccccaaagtgtctgtcttccttcctctgcttgtctctaggctctgaaactgcggcggccaccggacgcttctggagcaggtagcagcatgcagccgcctccaagtctgtgcggacgcgccctggttgcgctggttcttgcctgcggcctgtcgcggatctggggagaggagagaggcttcccgcccgacagggccactccgcttttgcaaaccgcagagataatgacgccacccactaagaccttatggcccaagggttccaacgccagtctggcgcggtcgttggcacctgcggaggtgcctaaaggagacaggacggcaggatctccgccacgcaccatctcccctcccccgtgccaaggacccatcgagatcaaggagactttcaaatacatcaacacggttgtgtcctgccttgtgttcgtgctggggatcatcgggaactccacacttctgagaattatctacaagaacaagtgcatgcgaaacggtcccaatatcttgatcgccagcttggctctgggagacctgctgcacatcgtcattgacatccctatcaatgtctacaagctgctggcagaggactggccatttggagctgagatgtgtaagctggtgcctttcatacagaaagcctccgtgggaatcactgtgctgagtctatgtgctctgagtattgacagatatcgagctgttgcttcttggagtagaattaaaggaattggggttccaaaatggacagcagtagaaattgttttgatttgggtggtctctgtggttctggctgtccctgaagccataggttttgatataattacgatggactacaaaggaagttatctgcgaatctgcttgcttcatcccgttcagaagacagctttcatgcagttttacaagacagcaaaagattggtggctgttcagtttctatttctgcttgccattggccatcactgcatttttttatacactaatgacctgtgaaatgttgagaaagaaaagtggcatgcagattgctttaaatgatcacctaaagcagagacgggaagtggccaaaaccgtcttttgcctggtccttgtctttgccctctgctggcttccccttcacctcagcaggattctgaagctcactctttataatcagaatgatcccaatagatgtgaacttttgagctttctgttggtattggactatattggtatcaacatggcttcactgaattcctgcattaacccaattgctctgtatttggtgagcaaaagattcaaaaactgctttaaggctgggccacatgttggaaataagctagtaatgttgttttctgtcaatattgaatgtgatggtacagtaaaccaaaacccaacaatgtggccagaaagaaagagcaataataattaattcacacaccatatggattctatttataaatcac

SEQ ID NO: 33 - DNA, 195 bp, Homo sapiens
ctacaggagaattttctgccgcaaccccgacagcagcaccacgggaccctggtgctacactacagaccccaccgtgaggaggcaggaatgcagcatccctgtctgtggccaggatcaagtcactgtagcgatgactccacgctccgaaggctccagtgtgaatctgtcacctccattggagcagtgtgtccctga

SEQ ID NO: 34 - DNA, 26928 bp, Homo sapiens
gcgtgagccactgcgccctgaccacatataatttttattaattataatgttgaaagtccctttattccacacctctcctctcattcactcctggtaggtcatttttaatgatttgatgtatatactgaatttggatgcttcttgctacagggcaaagacgctaataagattttgctggagccttttcacagatgcaagtcaatccaggcagtgtctatagctgctgaacccaaaatcagaaagcgagggctatcaaagctcttctgtcctgatttgcaactttagtagtgcaagaaaaaaaatcttagaataaaaaatgggtaccgttcagagacctttagagattgcaaggcatcacagatgataaaaagctccatctctagacgtgttcaggagtgggttggggctttgaccttgactagctgcatcaacttggacaagtcacttcgcttccctgtgcctcagtttcctcatccataaaatggggataagtatagtacctacctcataagtcctgcctacctagcacatggtgagcaattactaaattgtaggcctagtccctataatcccagcacttttggagaacaaggtaggggaatcgcttgaagccaggagttccagaccagcctggccaacatagtgagactgtgtttctataaaataaaaaaaaaaaatacccaagcttggtggtgcaggcctgtagtcccggctacttgggagtctgagtcaggaggattgcttgagcccaggagttcaaggttgtagtaagctatgattgcaccactgcactccagcctggcgacagagcatgaccctgtctctaaaaatataaaattaggccaggcacagtggttcatgcctgtaattccaacattttgggaggccaaggcaggtggatcactgtgagctcagcagttcgagaccagcctgggcaacaaggcaaaatcctgtctctactaaaattacaaaaattagccaggagaggtggtacacgcctgtaatcccagttactggggaagctgaagcaggagaattgcttgaacccgggaggcgaaggttgcagtgagccaagatcgtgccattgcactgcagcctaggagacagagcgagactcgatctcaataaataaataaattaattaattaataaaaaaataagttgggcatggtggcacctgcctgtagtccaagctactcaggaggctagaggtgggaggatcacttgagccaggagttctaggctgcagtgagctattatcacgccaccatactccagcctgctgtatgtactccagcctgggcaacagagtgacaccctgtctcaaagtaaagtaaaataaaaattaaaaaacaaattactaaattgtacttaacagtattgtcatcagtcttcctaaataggaggacaggcaaaattaagggacttaacatgtgccctcaggtatagtagtttggggcaggccagcatcacccgcacagtagttctgtactgtaggtgcgtgttctctgggtcaactttatggcccagtgaggccgtactctaccagaatgtcaggggacaagggttgggagaggcaaaagtgctggtctgaagcaggagtctgggtttccatcctagctctaccaccaattctgtatgaccgtgccccctccatttcctccatgaccacatagagacatggggcagttggatgaaatcaatgattcccagtcttggctctatcatggaaccatttgctaacttctttttttctcttatggatcccatatttttaaagatttttactaaatagaaattgacttatacttttccaagctggagtgtggtggcatgatttcagctcactgcaacctccgcctcccgggttcaagtgattctcctgcctcagcctcctgagtagctgggattataggtgctcaccaggcccggctaatttttttgtatttttagtagagacagaatttcaccatgttggccaggctgatttcaaactcctgacctcaagtgatctgctcacctcagcctcccaaagtgctgggattacaggcgtgagtcactatgcccagccgcttactcacattttctagtcaaaatagaaaactgcttaagtcactgtctgcagaagagcaaaaaaaaaaaaagaaataaaaaattgaaaactgctgatcagattgagaaaaacataagattattcaccacctaaagagaaaaaatttcagtcgaaagggaaaaaaattcatttttgtcttaataaggcaaattcacaatttttgaggttttaacaaaatatatgcagaaagacaaggccaccccgtagaacgtgcacacagccctaggcttggaaatggctggatttaataatatctggtctttctttgagccctgaaattctctaacactatgtcttggaacataattttactgttttcagtggttatagagatttgctttacaatttagcattggtctttacccatgattttgtttgacgccaacttgttggcaggaatgcaccccctgccccccgctttgttatggccttgctcctatagggcaagaatatctgctttaaggccgggtgtggtggctcaggcctgtaatcccagcactttgaggggccaaggcgggcagatcacctgaggtcaggagtttgagaccagcctggccagtatggtgaaatcctgtctctactaaaaataacaaaaattagctgggtgtggtggcacacacctgtaatcccagctatttgggaggccgaaacaagagaaccacttgaacccaggaggcggaggttgcggtgagccgagattatgccactgcactccagcctgggaaacagagcaagattccgtctcacacacaaaaaatatatatatgtctgctttaagtatgcaggccgtgtttgtgctgaacggcaggaatgccaaacttggctgcatggtaccaactagggacctcagagttccaaggagaacaaacagttggttcctggaggctgggggcttgtatcagaccctgaagactaagcatgtgctgggtccattgttgtcctgcacccatggtagtgcactaaacacctaacctatatttaagtgtttttgtttgtccaaaaaatgtcttttttttttgggagtcaagagtcttgctctgttgcccaggctggagtgcagtgacacgatctcagctcactgcagcctccgcctcccgggttcaagctattctcctgtctcagcctcccaaatagctgagactataggcacgcacatccatgcccagctaatttttttatttttagtagagacgaggtgtctccatggtggccaggttggtcttgaactcctgtcctcaagtgatccacctgcctcggcctcccaaagtggtgggattgcaggcatgagacaccgcgcccggcctgccttgtcccttcttaaaatgagttgtccatttgtaagctgctgatttctttgggacattgtctccgtaaacttttcataaagcatcagtgatttcaccattcttccacccaagcttcaccgtaaatttgttgtttgttcttgcttcaatttcagcagaattcatttagctctgataagggctcgcttcaaactgatgtcttatccttcttagtgcctcaaactacatcctgttcactcatgttatagcaagttagtgtgagtttattttggtgcacaaaaatttttttaaatccatgcagtcttttttcataatacgcattttccatgaacttttcgaagaccccttgtagatgtctgttgtttaaaccacccagtttacagtaatttttttttttttttgagatgaagtcttgctctgtcgcccaggctggagtgcattggcacactctcggctcactgcaacctctgcctcctgggttcaagcaatttttctgtctcagtctcccgagtagctgggattacaggtgtgtgccaccatgcctagctaatttatgtgtttttagtagagacggggtttcactatgttggctaggctggtctcgaactcctcaccttgtgatcggcccgcctcggcctcccaaagtattgggattacaggcgtgagactcttgcacttggcctacagtaattttatagcagcctaggctaagatagccatttctgggtataagaatgtcatatactgaacaggcctgcaactgtgagtaaaagtctgcaaagaggccgggcagtggctcatacctgtaatcccagcactttggggggccgaggcaggtggatcacctgaggtcagcagttcgagaccagcctgaccaacatggtgaaaccccatctctactaaaaatacaaaattagctgggcgtggtagtgcatgcttgtaatccctagcatgcacttgggagctacttgggaggctgaggcaggagaatcacttgtactcaggaggccgaggttgcagtgagctgagatcacgccactgcactcctttctgggtgacagagtgagactccatctcaaaaaaacaaaacaaaacaaaacaaaaacaaacaaaaaaacccaacaggtaggtagcagtggttcacgcctgtaatccccactttggaggctaaagtgggcagatcacctgaggtcaggagttcacgtccagcctgggcaacatggtgaaactctgtctctacaaaaatacaaaaattagccaggcatgatggcgggtgctgtagttccagctattcgggaggctgaggcaggagaatcgcttgaacctaggaggtagaggttgcagtgagccgagttcacgctattgcactccagcctccatctcaaaacaaacaacaaaacccaaaatatatattataattttattttatttattcaattttattttattttattttatttttctaggaacaggtctcattcaggccaggcatggtgctcacgcctgtaatcccagcacttgggaggccgaggtggaggtgggcggatcacctgaggtcaggagttcgagccatcctggtcaatgtggcgaaaccccatctctactaaaaatacaaaaattagccaggtgtggtggcacacgcctgtaattccagctacttgggatactgagtcaggagaatcacttgaacagggagatggaaattgcagtgagccgagattgttccactgcactccagcctgggtgacagggcgagactccgtctcaaaaaaaaaaaaaaaaaagaaagaaagaaagaaagaaagaaacaggatcttactctgttacccaggctggagtacagtggtgcaatcatagctcactgcaggcatgcaccaccattcccagctaatttttaattttttttggtagagatgagggtcttgctatgttgcccaggctggtctcaaactcctggcctcaagcgatcctgccatgtcggcctcccaaagtgttgggattacaagtgtgagccactatgcctggcctaaaaatatatatatgaaaatatataagaaatgggcctcccaggaattaaggtgtttgcgggagtcctggtccccagtttttctgccaacactccctgttcccacacatgacctggtccagaccccaaacagccaggcccaaaggacaggtgaggcgaggcgagaacttgtgcctccccgtgttcctgctctttgtccctctgtcctacttagactaatatttgccttgggtactgcaaacaggaaatgggggagggacaggagtagggcggagggtagggtaggaccagaagcctctctaggcctgccatggggcaggcagccagggagaaggagggcccctcagtggagacccagggatttcagtagcccctgttccgggacaggcgcaggtcctgggaggtgacagaagatagactaaaggcccaagagtccctggacctgactcctcccagcagctgccacacacaaacacacctccaggcaccctggacaggaaggaggagaaatgggcccctcctccagtggctgagaagctggggcaaatgttggctgttcctatccctggtgcatcccatggcgaggggcaacttccatcaggccacaccttttatctttgtctctatttttgatatctgtgtattatgattatacaaacccccacattggcctatatgtgcagatctgattaagaacttacgatattccatggacattccattcctaatctcctttagtcctcacaacaaagtattattcccattgtatagatgaggaaactgaggcacacagagatgacaagcaaccaccgctatatgttaggattcgaaggagctccaggaaagtctcatagccccactggccagaatgggctaaatctcagagggggagggtgggagatgggggtgacagtgaccttttttgtgactcctcctagaccatccatccctgctcccaggaggacctgtcctcccagatggtggagatggacaggaggactatctacccacccgtccccacggccctgaccctctgacctcaccctctccgctgatttcttcatgttagttcaacattacccagaggggtcaggacagacaattcctcagtgacccaggagctgacacactatggcgcacgtccgaggcttgcagctgcctggctgcctggccctggctgccctgtgtagccttgtgcacagccagcatggtaagggagtgcttgcaggctggaacaggctggaggactggggtgtgggcccatgggctggggtctcctggctggacagagcacacagagctggcccctaagtaggtctcagccccaggcggccagcttagggaagaagtcaggagctcagggctggaaagagaatggctgcttctctcttccaatatagggagcaggctgggggcaaggggcagtgtaggaggggcacagggggccacatttagcagccttccaggccttccaccagcccagactgcctctctcagaagccagcaggggagggtgggcttgcttcatgcccccagatggccaagactgcctgttcctgaggtcgctgttccatgacccccccaccgcctttacagtgttcctggctcctcagcaagcacggtcgctgctccagcgggtccggcgagccaacaccttcttggaggaggtgcgcaagggcaacctagagcgagagtgcgtggaggagacgtgcagctacgaggaggccttcgaggctctggagtcctccacggctacggtgagcctgggctgctcggacggtgccggggcctcagaccgggcccaactctagacacttccacagagaagcaagcgaggaacgccacagccccttcgctgctcacagcctcatttcaactctgagcccctcctcacagggctggcaagaggagcggcctcagcctttcctgggggtctctgtgcctggactgtgtccctgtgcagctccatgacatggggaggcctccacagtcttcagacatccacctgccttggagctctgtgtccacatggcctcctcagcggcagactcccacaccacccttgaggggtgggactctggggaggccaccacaagcccccgggctcaagactcagtgttcctggagctctgtgtcgcctttcctgtctgtagggactctgccagggacccactgccccctctcctcccatctcccccagcctctttcagactcggtgtgtgtgttggaggaactcccctatcctcaaatattcttctccttttggaaacaaaagtaggaaactctgccacaaacctccccagagcctgccccctgcgtgaccagggtaaggaaagtgtgaggaggagcataacatttactaaaacaacacaaaacaggagctgccgtagcctcactcccagcccttgtttttcaggatgtgttctgggccaagtacacaggtgagcaccgggaaggatttgccccaggaagggaggcctggggaccccagtgagagaattctacccagagaatcttctgctgcacctagccatccacccatccaccccttccccactccttccttggtccctcccatctgttcatccatctttctgtttctcaccaacatcccatccaccctgactccagctcatcctggccataccccaatcccaaaggtaaacacctgggtcttttccagcttgtgagacagcgaggacgcctcgagataagcttgctgcatgtctggaaggtgagcaactgacacgggtttggggagcaggacatggaggggagcttgggagaagagctcaggggtgggtttggagtgtggctggtggaggccgaggcagtccccagcatctgacattgctcccattcctggggtcaagatgtctctttgtacctggctctgtgtctggcatgcgaacgaatgaatgaatgaatggactaatgaattaatgtttttttttttgagacagagtctcgctctgttgcccaggctggagtgcagtggcacgatcttggctcactgtaaactccgcctcccggattcaagcaattctctgcctcaacctcccaagtagctgggattacaggtgctcgccaccacgcctagctaatttttgtatttttagtagagacggggtttcaccatgttggccaggctggtcttgaactcctgacctcgtgatccacccacctcggcctcaaagtgctgggattatagaagtgagccaccgcgcctggccatgaattcatgtttaaggcttcattctcctttgcctgacccgagtctctgcccccacctagtcagagctttgatgatgtcacattccccttctagctttaggtgtcactgaaccaaacaggaacccaaacccccagctgctctgacaccaaggacttccctaagcatgccaaggtgtttctagcacctggccttgcatatgttgtcaatttcctctggagcgaccatcacatctactgaacactttcctatccttcaaggactgcttcaaatgtcaccacttttgctgagacttcagggagcaccctccctcctgcactgtgtctgaaggcacctttagcacgacaaaaatggaactctttgtttatttataagagcagggtctcccttttttgccaggctgatcttgaactcttgggctcaggcaattctcccatctcagtctcccaaaggagtggattataagtgtgagccaccatgcctggctgccatactttcatttttttttttttttttttgaggtggagtctcactctgtcgcctaggctggagtgcagtggcgcgatctcggctcgctgcaacctccgcctggcggttcaagtgattctcctgccttagcctcctgagtagctgggattacaggcacacactaccatgcccagctaattttttgtattttttagtagagacggggtttcaccatgttggccaggctggtcacaaactcctgacctcaggtgatccaccagcctcagcctcccagagtgctgggattacaggtgtaatccactgcgcccagcctcatttgttaaattacgtactcaacagacattttacaaagttcctgctacgtgccaggcactatatcaggtgctggggattttaagagaatcaaatacagtctctgccttcaaggaattcaaaatctcaaaagagaacaaaaatacaaaatattaaaatgattgcggccgggtgtggtggctcaagcctgtaatcctagcactttgggagctgaggtgggcgcccaggccaggggtttgagaccatcttggccaacatagtgaaacccccaacctctactaaaaatacaaaaattagctggggtgtggtggcacgcgcctgtaatcctagctactagggaggctgatggggagaatttcttgaatctgggaagcgaaggttgcagtgagctgagatcatgccactgcaccttcagtctcggcatcagatcaagactcatctcaaatacataataaataataattcaataagtgattgcaagaaagttctgttcaaggcaccaagagaccacaggaaaatgagtgtctggtttgccagaaaatgagagatggcttcccaggagaggcagagttctgcctggcctagtgggatgcatggatgaacaaacaagtgggcattccagtcagaagaaacaatccgtggaaagacccagaggcatgagaagctgagctagcagggacaggtagaccagggccagttgaaaaggaccttcatcactttttcatcctgctggccaagagaagccacagaatggaagctccatgagggcagggctgtgactgtcctattggttgatgtgtactgagcacccgacagtgcctgtcatatggtaggcacttagcgaatatttggaggccactgttgagtgaatgggagaactgctggttgcagaggaagaggggctgggtgaatgcaggttcaggattgtggacctgcatgagctgggaggtgggggatagacaactttgcagggagagaggaaataagtccccaggctccaaggctgaccggggtggggtctccgcaggtaactgtgctgagggtctgggtacgaactaccgagggcatgtgaacatcacccggtcaggcattgagtgccagctatggaggagtcgctacccacataagcctgagtgagtgaggggtcggccttcccaccatgggctgagaacagggagcaagcgtacctcaagttcaacagcctcctgttgggcaatttcctcttccagaatcaactccactacccatcctggggccgacctacaggagaatttctgccgcaaccccgacagcagcaccacgggaccctggtgctacactacagaccccaccgtgaggaggcaggaatgcagcatccctgtctgtggtaggctgggggcagtggggcgacccatgaccaagcccgggggcttcatggggcctggcagcctgggatgggaaccaagaatactggctacccaggcacagtggctcatgcccgtaatcccagcactttgggaggctgaggcaggcagatcacctgaggtcaggggtttgagaccagctgggccaacatggcaaaaccccgtctctactaaaaatacaaaaattgccaggcgtggtggtgggcgcctgtaatcccaactactctggaggctgaggcacgagaatcgcttgaacccgggaggcggagtttgcagtgagctgagatcctgccactgtacttcagcctaggcgacaagagcaaaactctgtctcaaagaaaaaaaaaagatgctggccaccttcagagctggcgtcagtcattcagatcatatctgtgcctattgctcagtaaagtcagggaatcaggggatctgagtggggggatctgccagcctcctcctccccctccccactcttgacttccttatggtctaggctgtggctcattccaaacatgcctcctttctgatcaaggcactcctccctccgggaagccctccctagccatttcagtccacacaccctgttctgagtatcacagagcaagccttgtgcagtttggcccgcgggattctgtcattattatttccttggtgtgttaagtagctatagccaccccttccctgaggcagaccacaataagcatttctttttcccatgagggttggcaggtgtggctgcactcgctaatgcgtctgtagggtcaactgacggaggttggccctggctgggtggctctgattcaaataatgggtccagctgagtctggctcctcgttgagggttgggcctagatctgctccacgtgcgttcatgctggggctgaggctgaaagaaggtacctgggaaaactcttcttatgctgatgacagacacagaaaacaatgaacagaaaagcgtcttctgtcctgaaggcctggctcagaacaggcacagtcagccctgcccacgttccattggccagagcaagtatatgttcaaggccagggtcaagaggtaaactacacctcagcctgtaaaatcacagagcaagggatgtggatgcaggcaggggtaaagaatttgtgccgattaccagtccacaaacatgcgttagtgtttgttctctaggcaaccctgtcgggcccattgctcattcctggggttggtcttttttttttttctttctaagaaggagtctcactcccttgcccaggctgttggagtgcagtggccctatctcagctcactgcaacctccgcctcctgggttcaagcgattcccctgcttcagcctcctgagtagctaggattacaggcgtgtgccaccactcctggctaatttttttttatgttagtagagacggggtttcaccatgttggccaggctgatctcaaactcctgaccttgtgatcctcccgcctcggcctcccaaactgctgagattacaggggtgaggcactgcgcccagccatttttttttttttttttttttgagatggagtctcactctcacccaggctggagtgcagtggcataatcttggctcactgcaacctccacctcctgggttcaggcgattctctgcctcagcctctcatatagctgggattacaggcacacgccaccacgccttgctaattttgtatttttagtagagacggggtttcttcatgttggccttgcctgacttgaactccttgttccggtgatctgcccagctcggcctcccaaagttctgggattacaggtgtaagccactgcgcctggcccctggtattggtcttatagcaagtttatcccaacaaaaacagctactatttactccccaacccccatacacacgcacacacattgatgataaataagttgcaggcttgcagaaattggcccatccaggtgaacagcctagtgatccgagcaagcgtcctgctgtgcagctataaaaacatgactcctccagcagctccaggcagccactaccagttggttacagatggcctaggaggccaaacctggttactatctctggtttattatgtgccagacacttatgctgtatattttgtttaatcctctcaacaaacctgcaaaagtggcattagtaacccctttaaaggcaaacggtcagaagcccagagaggttaagtaacctgaggtcacacaggcagaaagcagcaagaccggggttcacacccctgtctgttccggtccatgtgtggtctcactcactctgctgcctccttgcccctcacccaccaggccaggatcaagtcactgtagcgatgactccacgctccgaaggctccagtgtgaatctgtcacctccattggagcagtgtgtccctgatcgggggcagcagtaccaggggcgcctggcggtgaccacacatgggctcccctgcctggcctgggccagcgcacaggccaaggccctgagcaagcaccaggacttcaactcagctgtgcagctggtggagaacttctgccgcaacccagacggggatgaggagggcgtgtggtgctatgtggccgggaagcctggcgactttgggtactgcgacctcaactattgtggtgagctgcctgggtagggggcctgagttgcagggacaaatcctagtgggaataacaacagccgcttctgcttatcgaacgcttacctcattgagtgcgctcattacagccttacagtaaccaggtggggggtaaggtcctgtgcccatttcacagataagtacactgaggccccaggaggttattgcctagtagcccaactgtgcatgcacgcttaacctctgcaccaaatggcctccaaggcccgtaggggaactggggggatctaggggatgggtgaggaatggcccagcccagtcccggccggtgcctgggtcccaacagaggaggccgtggaggaggagacaggagatgggctggatgaggactcagacagggccatcgaagggcgtaccgccaccagtgagtaccagactttcttcaatccgaggacctttggctcgggagaggcaggtgaggtagtgggcatccgaggggatgcggggctgcggggctggtggccaggacttgcccctcactgcttggcttgctctgcagactgtgggctgcgacctctgttcgagaagaagtcgctggaggacaaaaccgaaagagagctcctggaatcctacatcgacgggcgcattgtggagggctcggatgcagagatcggcatgtcaccttggtgtgtcctggagccctgcgctaccattcactcctgggggcaggtgtgctgctggacccccaccctcaggccctgcctgcaggcctgggctttacagatgacaacagctgagcatccaggatcccaccaactccacacagcagccacatgagatgggttgtttacttcttttttttttgtttcttagatggagtcttgctctgtcacctaggctggagtgcagtgctgcaatctcggctcactacctcgatctcagctcactgcaacttctgccttccgggttcaaacgattctcttgcctcagcctcctgagtagctgaatttacagacatgcgccaccacacccggctaatttttgtattttaagtagagacagggtttcaccatgttggccaggctggtcttgaactcctgacctcaagtgatccacctgcctcagcctcccaaagtgccgggattacaggcatgagccaccacacccggcccatgggtcctttacttctaagcagatggtaaagctgagactgacggagctggtggctcacctccgcgcacagctaatgggtttgaatccagttcttctgattccagagctgtgctacgctatgtgaactctggactggaaggacctagttagggggtgcaaaaagcaggaggcaggtcaggtgcagtggctcacccctgtaatcccagcactttgggaggccaagacaggaagatcacttgagggcaggagttcgaggccagcttgggcaaaatggtaaaaccccgtctctactaaaaatgcaaaaattagccaggtgtagcagcatgtccctgtagtcccagctactaaggaggctgaggcgggaggatcgcctgagcccaagaggctgaggcttcagtaagctgtgactgtaccattgcactccagcctgggtgacaagagtgagaccctgtctcaaaaataaataaataaataaataaaaagtgtgaggcagcccctcagcatcacacggaggctccagccccaaaggcggccagcccaagcttggatctgggccccggaggcagctctgcccagctgggttcttagacctgggattgttacttctagggctggtgtagaggcagccccctcatcctcagctcctaatgcttcctgctgcccctcccaggcaggtgatgcttttccggaagagtccccaggagctgctgtgtggggccagcctcatcagtgaccgctgggtcctcaccgccgcccactgcctcctgtacccgccctgggacaagaacttcaccgagaatgaccttctggtgcgcattggcaagcactcccgcacaaggtacagaactggtggcccgtgggtgtctggcaggggtctgagtcctccaaagcgatcatgaggggccttggtggctccgggacacataggatgttctgtataccccccagaatataacatcccagcagtctctgctggaaagccatttggtcacgtcctgactgaggcttggagcgcggggagaatccgtctgtctctggtccctccaacactaggatatagcccatgtgggagtctctgaaaatagagtctgtctggactagggcgtgcagcctgtgcccctgtccccgtcctccaggctgtctgactccaaagccctgcacggctttaggcccaggaagaaacacccagggggctgccatggcaggaaccagccctatcccctccctggtggcctgcaggacacactgtctcccagaaccccaagggcaggcagtttcctgctccttgctgggtgaacctgcagcttctccatttctttcttggggtctctgcaggtacgagcgaaacattgaaaagatatccatgttggaaaagatctacatccaccccaggtacaactggcgggagaacctggaccgggacattgccctgatgaagctgaagaagcctgttgccttcagtgactacattcaccctgtgtgtctgcccgacagggagacggcagccaggtgggccaccagatgcttgttagctgaggggcagaagccaagttctgggcctggctctgataccaagtagccttgcaagagcccctttcccttttccaggcctcggtttcttggagtgaacccaaaagttcttttcagtactggcgttttattttttatttatatttatttatttactgacggagttccactcttgtctcccaggctggagtgtagttgtgcgatcttggctcactgcaaccccacctcctgggttcaagcgactctcctgcctcagtctcctgagtagctgggattacaggctaatttttgtatttttagtagagactggtgggtttcaccgtgtcggccaggttggtctcgaacccctgacctcaagtgattcacccgcctcggcctcccaaagtgccgagaccacaggcgtgaacgtctgtgcccagccagctctggcgttttagattctggtctctaagaaatggcgttggggccaggcggctcctgtgggggttggctctcactaggcccttcttccttccccaaagcttgctccaggctggatacaaggggcgggtgacaggctggggcaacctgaaggagacgtggacagccaacgttggtaaggggcagcccagtgtcctgcaggtggtgaacctgcccattgtggagcggccggtctgcaaggactccacccggatccgcatcactgacaacatgttctgtgctggcaagtctgtgcagggcgggctgagggaacagtggggcccaagctgggagaactgagttgtgcctgggttcaagccatgtgactttgagcaagttgcctaacctcttggtggctcagtttcttcctctgtaaaatggaggtaaaagtctctatcccataaggttatgggagggttaaatgaagtagtatatattaatgtacttggcatagtatcagtcaccagtgagctcagatagcagcaagaggctgcgggtagggaaatgccattcattcagtcactcagcaaatatttattgagcgcctatcacgttccaggcagcgttctagggtatacagcagggacccagacggacaatgtctgtgccctcagagagcttccttcctaggagggcacatccataaacagatctaaaacagcaatccctgaccagtgctgtgaagaaaaatgaagcacagggagagagaacggctgatgaagtgggcttctaaatagggtggccagacaaggtgggcagatcacttgaggtcaggagttcaagaccagcctggccaacatggtgaaaccccgtctctactaaaaatacaaaaattagctggtcatggtgacgcatgcctgtagtcgcagctactcaggaggctgaggcaggagaattgcttgagccagggaggcggaggttgcagtgagctgagatcgggcatcattgcactccagctgggcaacacagcaagactccattgatcgatcgatcaatcaatcaatcaggtggccagagaaggttggagaaggcctccctgagaaggtgatgtctgggcagggactggaagaggggaaggaaggagtgagcaggcatatctaggggaggagcaccgcaggctgggggcatggcaggcactaaggccctgaggtgggagcactcttggcttgtctggggagcagtagggaggcctggggggctgaggaggggcagcagtgggtgaggggagagaggggggcaggcagaggacagccacttcctttagggcctggaaggactttattgagtgagatgggaagttattgaggggcttgaggcaggttaagaaatgatgtgactgactttaaaagtaaaaaataaaaaaatttagtgtaatttcagactcacagaaaagttgtaaaaataatacaaagatttcctgtatactgtcatccagattgtcctccattctgtggatgtgtgggaatttttatatatatatatgcatagtttgagagcaaatcatgaatatggtttctttttacccataaatacttgagtatttccaaaaaaaaaaaaaatacccaaggatgttctcttatgcaaccacaatacaaatattaaaacccggaaatttttttttgacatagcttcgcgtcacccaggcttgagtgcagtggcacaatctcggctcactgcaacctcctgctcccaggttcaagtgattctcctgcctcagcctcctgagtagctggaatcacaggcatgtactaccatgcctagctaatttttgtatttgtagtagagacagggtttcaccatgttggccaggtcggtcttgaactccgacctcaggtgattcacctgcctcggcctcccaaagtgctgggattacaggcgtgaaccactgtactcggccaaaaccaggaaatttttttttttttttgagatggaatcttgctctgttgcccaggctagagtgcagtggcatggtctcggcttacttggaattacaggtgcctgccaccacgcccggctaactttttgtatttttagtatttttagtagtgatggggtttcaccatgttggccaggctggtcttgaactcctgacctcgggtaatccacccacctcggcttcccaaagtgctgggattacaggcgtgagcaccagcacctggcccaaaaccaggaaattaatgatgatacaatattattgtctaatctatagaccttattcaaatttttgttagtcttgctaatgtcttttatagggaaaaaaaaaaaaaaaagcgtgtttctcacccaggattcaatgaaggatctttctttgtcttctatgaccttgacatgtctgatgagtgcagtctggttattttgtacactggccctgaatccgggtttgtctaaggtttcctcacggtcaggttcgggctcagtggtgccatgtccttcttggtgcatcctgttaactggcacatgagaacaatttgtctcatatgtggtgagtctaactctgacctcttgaggaaggcaatgtctgccaagtttcttgctgtaacttctgtttttccctttgtaattaataagaatctggtaaagagacactttgatgtttttttttttttttttttttgtgatggagtctccctctatcacccgggctggagtgtgtggtgcgatctcggctcactgcaacctccatcccccaggttcaagtgattctcctgcctcagcctcccaagtagcagggattacaggcatgtgccaccacacccagctaatttttgtatttttagtagagatggggtttcaccatgttggccaggatggtctcgaactcctgaccttgtgatccgtctgcctcagcctcccaaagtgctgggattacaggtgtgagccaatacgcctggcctactttgatattttgtattctgtttgcatcaaaaccttctcccaactagggtgactaccaaatggcacttatctaattctgtcattccttctacatttgttagttactttattgctttccttcctttcattctatcagtgtggacttaaggatccttactttattctaagggttcaccttttttttctttttttttgagatggagtttcgcccatgttgcccaggctggatggagtgcaatggcgtgatctcggctcactgcaacgtcctcctcccaggttcaagcaattctcctgcctcagcctcctgagtagctgggattacaggcatgtgccaccacgcctggctaattttttgtatttttagtagagacagggtttcaccatgttggccaggctggtctcgaactcctgacctcaggtgatccgcccgcctcagccttccaaggttctgggattataagcgtgagctctaccgtgccaggccatactttgttactactgttattttttctgatgctcagatgatcccaagtttggcctgtggaagtcccttcaagctggcttctgtgacttggggagatgttctgtcattctttgagtactttctttctttctggcacagcaaaatgattcaggttaatcctactttccttactgtagtgttggaaccagccatttctccagggaacccttgtagtcaagagtggaatttagaactgagatctgggtgctggcgtgtgcacattgctagtgggatgtcattacttctaggctctcttagtggacagaaccagaaaaaaattatatgatgcatataccaatatctctatcatctatataaaaaaccatgagttcctactgaaacctccaattccattctaacaccacaggattaattttagcttttccttttccatatttgtaactctctctgttgacagtgagaaacctgaccctcattatctgtaatgcatttgcctatttgaacaatactagaatatagtttcaaaatcctccatccataacactattaaaaccaatcctatggctgggctcagcccactgcaacctctgcctcctggactcaagccagcctcccactttagcctcccgagtagccagggctacaggcacacaccaccatgcccagctaatttttgtattttttgtagagactgggtctcactgtgttgcccagacaggtcttgaactctgagctcaagtgatccatccaactcagcctcccaaagtgctaggattacaggtgtgagtcaccatgcctggcctctcctagtaaatttttagaagtggtgttgttaggtcaaaaggcaaacatgtatgtcattttttagagatttttaaatttctttccataagggttgtaccagtttgcatttccatcacagtgtatgagaatgcctgtttccccacaaccttgccaaaagaatgtcacagtttaaattttaccaatctgagaggtgagaaatagtacctgaaattgtttaacggacatcttcaaattgaaattgaggttgacaacgaatcatagttaggaccttttttttttttttttttgagtgggtctcctcgtcaccaagctgagtgcatggcacgatttgctcactgcaacttccgccttctgggttcaagcgattctcctgcttcagcctcccaagcagctgggactccaggcgcgagtcaccatgcccgctaatttttgtatttttagtagagacagggttttaccagattggccaggctggtctcgaactccttaccttgtgatcctcccgcctcggcctcccaaagtgctgagattacaggcatgagccaccacgcctggcctaaggaccatttttatataattttttttttgagacagagtcttgctttgtcacccaggctggagtgcaatggtgcaatcttggctcactgcagcctccacttccctggttcaagtgattctcctgcctcagcctcccgagtagctggttccacaggtgcgtgcctggctagtatttgtattatataatttttttgtgaattgtctcttcatggttttttgcccattttttggtccctttcttatcaatttttgtgagttcttcgtatttatattaggcctttatttgtgatatacattgcaaatgttttctcctagtttgtcagtttttttaacctcatgtataatttttctggccatgcagtttaaaaaattactaggtagtcaaatttatcaatcattatttataaatctggtttgaacagagataaactttcctggccaagtgtggtgtttacacctgtaatcccagcactctgagaggctgaggtggggatcacctgaggtcagaagttcaagaccagcctggccaacatggtgaaaccctgtctctactaaaaatacaaaaattagctgggcgtggtggctgatgcctgtagtcccagctactcaggagactgaggctggagaattgcttgaacctgggaggcggaggttgcagtgagcagagatcgtgccgctgcactccagcctgggtgacagagcaagactctgtctcaaaaacaaaacgacaaaaaacaacaacagaaaagcctttcctgatagctaggtcattgaggaattcactcatgttttcttctagtacctgatttcatttttctgcacttagattcctgactcatatggagtttatttttgtatctgatgtgaggcatagatctaatttattattttccaaatggctaactagctgtctctaaaccctttattaaaaattattggccaagtgcggtagccacacctgtaatcccagcagtttggaaggctgaggcaggattgcttgaggccaggaattcaaaaccagcccagacaacatagcaagaccctgtctctacaagaaaatattggtcaggtgtggtggctcacgcctataatcccagcactttgggaggctgaggcaggtggatcatgaggtcaggagatagagaccatcctggccaacatggtgaaaccctcgtctctactaaaatacaaaaaattagctgggtgtggtggcgcatgcctgtagtaccagctactcaggaggctgaggcaggggaatcatttgaacccaggaggtggaggttgcagtgagctgagatcacgccattgaactccagcctggcgacagagcaagactccatctcaaaaaaaaaaggaaaaagaaaatattttaaaaattagctgggcatggtggcatgtgccttgtagtctcagctacttgagaggctgagttaggaggattgcttgagcctaggagttcaatactgcagtgagctatgaccgcaccattgcactccagcctgggcaacagagtgagaccctgtttctattaaaaaaaaaaaatcggctgggcgcggtggctcacgcctgtaatcctagcactttgggaggccgaggcgagcggatcacctgaggtcaggagttcaagaccagcctgaccaacatggaaaaaccctgtctctgctaaaaatacaaaattagccagacatggaggcacatgtctgtaatcccagctactcgggaggctgaggcaggagaatcgcttgaacctgggagacggaggttgcagtgagctgagatccctccattgcactccagcctgggcaacaagagtaaaaactccgtttcgccaggtgcggtgactcacacctgtaatcccagcactttgggaggccgaggtgggtgaatcacaaggtcaggagtttgagacaagcctggccgacatggtgaaaccccatctctactaaaatacaaaaaattagcctggcatggtggtgtgcgcctgtaatcccagctacttgggaggctgaggcaggggaatcacttgaacctgggaggaggaggttgcagtgagccgagatggtgccactgcactccagcctggcaacagagcgagactctatctcaaaatcaatcaatcaatcaatcaatctttgaactagtgatttgagatttcacctttatcacattctagattgtatcttattttcatttatttatttgaaatatagacaagtctccctgtgctgcccaggctgatttcaaactcctggctgggctcgagcaagtctcccgccttggcctcccaaactgctgggattacagacgtgagccaccatacctgacccaggttttattttttagttttattttttcctgcatccagctaatttgatttgatttgtagagacggggtcttgctatgttacctaggctggtctcgaactcttgggctcaagtgatcctcctaccttggcctcccaaagtgttgggattaccagcatgagccacggtgcccagccccacgttctagatttctatggatagagtatgcttaaggatgagtatgtttctggatgttcgactcggctttcctggtctgttgtctgtctgtgtacagcgtcacattgttttaatgatagaggctttagcgtacatagctgggaaggctaatgttctcttttagtttttctttccagtggtttcctggcaattcttgcatgtttgtttttccatatgaactttagtgtcaacatgcctaggtctataaaaaagcttggtggtaattttattgggattatgacacttcaacaaattaactgggagaatgaacatatttttgatgttgagtcattttatccaaggataagaaacgttttcctatttgctcaagtctattattgtatctttcttgactgctgcaatgtattctcttataattttttctattggtatcttattttatgtatttgtaatatcttatttttcttgagtaaattagttaatggcttgccggttttctcaaaacaaatatctagggatttgatttatgaaattattaggcctattatttttcttttttttgagatggagtctcactctgtcgcccaggctggagtgcagtggcgtgatctcagctcactgcaacctccacctcctgggttcaagtgattctcctgcctcagcctccccagtagctggggttacaggtgcacgccaccatgcccggctaatttttttatatttttagtagagacggggtttcaccatgttagccaggctggtctcgaactcctgacctcatgatccgactgcctcagcctcccaaagtgctgggattacaggtgtgagccaccgtgcctggccttttttttttttttttgagacagagtcttgctctgtcacccaggctggagtgcagtggtgcgatctcggctcactgaaagctccacctcccgggttcacgccatcctcctgcctcagcctcccgagtagctgggactacaggtgtacactgccacgcccagctaattttttgtatttagtagagacagggtttcaccgcgttcgccaggatggtctcgatctcctgaccttgtgatccgcctgcctcagcctcccaaagtgctggtattacgggcgtgagccactgcgcccggccaggcctattatttttctattgtggttcattaatttctgcttttttctcttaaaaagtttgcttacgtttttgtctggtttactttgctgttctcttgctagcttttttttttttcagatagggtcttgctctgttgcccaggctggagtgcagtggcacagtcatagctcactgcagccttgaactcctgggctcaagcaatcctcttcttgcttcagcctcccacgtagctaggatcagaggtacatgccaccatgttcggctaatttttttttttcgagacagagtcttgttctgtcgctcaggcggtagtgcagtggtgcaatcccggctcactgcaacctccacctccacctcccaggttcaagcaattctacctcagtctcctgagtagctgggattataggcgcacaccaacatgtctggctaatttttgtatttttagtagagacagggtttcaccacgttggctaggctggtcttaaactcctgacttcatgatccgcccgccttggcctcccaaagtgctgagattacaggtgtgagccacagcacctagtgaaagtgtggtttttttgtgtaggttttactgttgttagtgttgttctgtattgtttgtagaggatacgtggggagatttggataaaagcaactatcattattatcctcatcagacttgtaggtctaactttttaattttttaatttttaatttaaatttttttcttggtcttttatcattaattaattttttcgagacagggtctcactctgttgcccaggctggagtgtggtgacatgatcacggctcactgcagccttaacctcccaggtgcaagtgatcctcctctcttagcctcccgagtagctgggactccaggcatgtgccaccatgcccagctaattttttgtagagagagggttttgccatattgcccaggctggtcttgaactgctgagctcaagtgatccacccggcttgggcatgagccacctcccctggtctggtccaactttttaaaagcattattctgcctgttgggtggagaatagactgtaggtgggcaaagaatgaaggaaactagtgggttcaggagctcgagctagaagtggtgagaagggtttggatttggggtctatgctgaaggtagagccgacaagatttgctaggattggatgtgtagggtgaggaagtggggacagcaagaatgactggaggggtaagtggactctcaccagctgtgtctcgtgaaggggcgtggctgggctatgagctatgctcctgagcacagacggctgttctctttcaaggttacaagcctgatgaagggaaacgaggggatgcctgtgaaggtgacagtgggggaccctttgtcatgaaggtaagcttctctaaagcccagggcctggtgaacacatcttctgggggtggggagaaactctagtatctagaaacagttgcctggcagaggaatactgatgtgaccttgaacttgactctattggaaacctcatctttcttcttcagagcccctttaacaaccgctggtatcaaatgggcatcgtctcatggggtgaaggctgtgaccgggatgggaaatatggcttctacacacatgtgttccgcctgaagaagtggatacagaaggtcattgatcagtttggagagtagggggccactcatattctgggctcctggaaccaatcccgtgaaagaattatttttgtgtttctaaaactatggttcccaataaaagtgactctcagcgagcctcaatgctcccagtgctattcatgggcagctctctgggctcaggaagagccagtaatactactggataaagaagacttaagaatccaccacctggtgcacgctggtagtccgagcactcgggaggctgaggtgggaggat

SEQ ID NO: 35 - DNA, 160361 bp, Homo sapiens
  misc_feature 151844-151943, 154924-155023: N = any nucleotide
gaattcctgtctaatggtcacccaacttctgcttgcatacctccagagatgaggaactccctaccattctggaaacagctctgatggttgctctttcttttttttggttgttatttttgagacagagtctcattctatcacccaggctgaagtgcagtggcctgatctcagctcactgcaacctccacctcctggtcaagcgattttcctgcctcagcctctcgagtagctgggattacaggcatgtgccaccatgcccggctaatttttggatttttagtagagatggggtttcaccatgttggccaggctggtcttgaactcctgacctcaggtgatctgcctgcctaggcctctcaaagtgttgggattacaggcatgagccaccatgcctggcctgttgctctttctttgttcagtataaatctgccttcttatggttcactttgtcttggctctgcactttgaggcatcccagaataagagtgtttcctctcttttccaaggcagctttttgctgtttaaggcagtgatcttacctgtcttcttccctagttcctacaactgttccccacaatgacttcccaagagggcacccagaaccaaaggcatcctcaggtgtggttgacctcttgtgcagagtactaagaaccctctggtggctccctttccataggacgaagccaaagctgccaacttggctttccaggcctttcataatttggctccatcactttccaaggctcctactcatctgttactcccccaacatgctgtcaccacatacgctgtgtgttatttttgaacacaccagatttggcaatctgtgttgttgtccatgtttattccactatctatctagatggcccctacccacactcccagctccctcccttctccacagtttctgatcctcctttaagattcacctaggctggatgcagtggctcacgcctgtaatcccagcacttcgggaggccgaggtgggcagatcatttgaggtcaggagtttgagaccagcccaggcaacatggcgaaactctgtttttactaaaaatacaaaaattagctgggtgtggtggtgcacacctgtagtcccagctgctcaggaggctgaggcaggaggattgcttgagtccgggagacagaggttgtagtgagccgagatcaggccactgcactccagcctggtcgacaaagcaagactccagcttaaaaaaaaaaggaacaacaacaacaaagattcaccccatgttattccctcagtaaaacttttcctaactcctccctatgcattgccttctttgcaggtatgcctttgacaacgtgtattagattgtatttttttttttattagattgtatttgaattgataactggtctaaaacaagtaagtgagaagacacaaagcatagggtaaatgtagttagtaaatcttcctggagtatccattttagttgatgctaagtcatttaaaacatttattggctgggcacagtggctcatgcctgtaatcccagcactttgggaggctggggtgggtggattgcttgagccctggggtttgaggcctgcctgggcaacatcaggagactctgttactacaaaaaataaatgaaaaattggccaggtgtcgtggcacgtgcctgtagtcctagctacttgggacgctgaggtgggaggctcacttgagcccaagatgttgaggctgcagtgagccacgatcccaccactgtactccagcctgggcaacagaacaagactctgtctcagagtcttatcaacataaaacaagcacaacaatattatgaagcaacatacaaaaccacgtaccttttaaatttcatttatttactattattattattattattttttgagatggagtctcgctctgtcacccaggctggagtgcagtggcgcgatctctgctcaccgcaagctccgcctcctgggtgcacaccattctcctgcttcagcctcccgagtagctgggactacaggtgcctgccaccatgcctggctcaatttttgtattttttagtagagacggggtttcatcgtattagccaggatggtctcgatttcctgacctcgtgatccgcccgcctcggcctcccaaagtgctgggattacaggcgtgagccaccgcacccggcctatttatttattttttgagacagagtctcactctctcgcccaccagagtgcagtggcatgatcttggctcaccgcaacctccgccttccaggctcaagcgattctcctgcctcagtctccagagtagctgggattacaggtgcatgccaccacgcctgtctaatttttgtatttttagtagagacggggtttcaccatgttggccaggctggtcacgaactcctgacctcaaatgatccacctgccttggcctcccaaagtgctaagattacaggcgtgagccaccgcgcctggtccacatacttttaaatagtcaatttcactgggaaaaaaggtcaggggactgttccagattgagacactagaaagaatagccaaaatataaaacttgatagatctttgattgaaaaatagctataagacatttttggtgctggtatgatcattagatggtattaggaaattgtttttaatcttctgaggtatggtaatagagaacattcctaggagatgcttactggaatatatatatatatatatacacactatatatataacatatatatatatatacacactatatatataacatatatatacacaatatatatataacatatatatacacaatatatatataacatatatacacaatatatataacatatatacacaatatatatataacatatatacacaatatatataacatatatataatatattatatatattaatttaagaatatttgggagtaaagaattatgatgtttgagctcagtgtggtggtgttcacctgtagcctcaggtactaaggaggttgagatgggagacttgcttgatcccaagagttcaagtccagtctgggcaacaaagcaagaccctatcttaaaaaaaaaagaaaattagggtcgggcgcagtggctttcacctgtaatcccagcactttgggaggctgaggtgggtggatcacaatatcaggagatcaagaccatcctggccaacatggtgaaaccccatctttactaaaatacaaaaaatcacctgggcgtggtggcacgtgcctgtagtcccatctactcgggaggttgaggcgggggaatcgcttgaacatgggaggcggaggttgcaatgagccaagattgtaccactgcactccagcttgggcaacaagagtgaaactccgtctcaaaaaaaaaaaaaaaaaaaagaaaagaaaagaaaagaaaattattatggagtacgtctgcatcttactttcaatggccagtgaaagtcaaatatgtatgtgtgtacatacatgtgtgtgacagtgaaaagatttttgtcctccgatctaggtggcatacagatgttcatgtcattagtctctcaatttttatatttgaaattttttttttttgagaaggagtctcgctctgtcacacaggctagagtacagtggcacaatctcagctcactgcaagctccgcctgctgggttcacgccattctcctgcctcagcctcccgagtagctgggactacaggtgcccgccaccgcgcccggctaatttttgtatttttagtagagacagggtttcaccgtagtctcgatctcctgaccttgtgatctgcctgcctcagcctcccaaagtgctgggattacaggcgtgagccactgcgcctggcctgtatttgaaaatttttaagtaaaaagttggaggatcagagattcaaggtaaaatttctttttaaaaagattaaaaattacaaataattttttttgagactatctcgttctatcatccaggctggagtgtagtagcgcaaacacgggtcactgcaacctcaacctcctgggctcaggtgattctcccacctcagctcccaagcagctggggctacaggtgcatgccaccacgttcagctaatttttttaaatttttttgtagagatgggggtcttgctttgttgcccaggctggtcttgaactcctcggctcaagtgatcctcccactttggccttgcaaagtgctaagattacaggtgtgagccactggggcctggccaaggacaactttttttttgtcttttttttttttaagacagagtttcgctcttgttgcccaggctggagtgcaatggcgcgatctcggctcactgcaacctttgcctcccggttcaagcaactctcctgcctcagcctctcgagtagcgggattacaggcatctgccaccatgcctggctaattctgtatttttagtagagatggggtttctccatgttggtcagggtggtctcaaactcccgacctcaggtgatccgcccgcctcagcctcccaaagtgcggggattacaggggtgaaccaccatgcctggccaaggacaactattaataagtaaacaggacaaggctctagcactctcctaggaaagattaaaactttccgagcctgtagaacagtggttctcaaacttgcaccagaatctcccagatggcttgctaaaacacagactactgaacactttactcccccaaaatttcttgaaggagaagttaacttggctttatgctgccctcctgactatagttctagccatggccagcaccagtgttctcagccttgactgcacactggaatcacctcaggaggctttaaaatctgatgtccacctcagagattctgatttattttatttatttattttaattaactttttttttgagacggagtctggctctgtcgcccaggctggagtgcagtggcacgatcttggctcactgcaagccccactcccaggttcatgccattctcctgcctcagcctcccgagtagctgggactacaggcgcctgccaccgcgcctggctaatttttttgtatttttagtagagacagggtttcaccgtgttagccaggatagttttttgttttttttttttgagacagagtcttgctgtgtcacccaggctggagtgcagtggcgcaatctcggctcactgcaagctccgcctcccagattcatgccattctcctgcctcagcctcccgagtagctgggactacaggcacccgccaccacacccggctaattttttgtattttttaatagagacggggtttcaccgtgttagccaggatggtctctatctcctgacctcgtgatccgcccgcctcagcctcccaaagtgctgggattacaggcgtgagccaccgcgcccggccagagattctgatttaattggcaggccttggtggggcactagaaactgtacttccaggaagttctcaagttgtggatgctgttgatccaggaccccactttgagaatcactgctctagagcaggatttctcaaaagcatcactcatgacatcctaaagcagttaattctttgagcatctctggcctctacccacttatatgtctgtagcacccctctagatagctccagacattgtcaaattgttccctgggaggcaaaattgcctaagattgagaagcactgctctagaagatctaagttaaaaaagaatgcaagagtctaggtgggttgcagtgtcaattgaagaaaagaagttgaagcctagaagaaagagtttggaacatccccgggcttgatgcagaggatggccatccatgcaggcttctttcagaggagcatcattatgtgtctggggttcacagacaattgatcaaagggcaggctaagaggctaagagctcagacctggcatcatttggttccacaggaacagggctgtccattttaagtcaggctcctccctcttcctgggacatcagctgtcaagccccaaagactcttggaaaaagcaatcctgtcctaacccaaatggcctgacaacctttctttaaggctcaactgcctacggctccaaattgctcagagctctcttttacctcagtttcccattcttctactttgagatgttagtaagcggcagactctagtctattagtaagaagcaaatagttttgttgtgaagaagcaactctgataagcctttacctgttctttctagcttattagatccaatccctgaaaaagattgttcttgtctttgaaaccagcaactctgcctattacctatttacttgaaatagaagacaacgtctggaggcttggatctgcttccctacaggactcatccttgcataacttcactaggcccatgaaggtcttcagggattagcttctctaacctgaaaagggatcgaccatccctgaacaaccaggggaagtaggtgagggaagacagtaccaatttttgttctgatgggctggcctgtaaataaactgtttagggggttgggactgaacgggattagggctactgactaggagaaaaggtagttattatatcagggaggccaaaaaaaaaaaaaaggaaaaataacctgaaaatctgcctccctaaaaattcaacccacaaaactcagccacgcagcaaaaaagaaatttggctctttaagtgccaacagtattaagtgctagagattgtggaagtcataaagggaaattaactgaaaatcagggatgccattactcattcgggagcaatctctctctcccaaagtgagaatacaatctgcaccctctggggatcttttatacgcaaatctttattccccaggctggggcttctattttcttcaaattctaaatggtgctgctatttcctgctaatggcttctacccagcctcttgaagaaggcacctgaggggggactgaagaagctgaggttagaggaaagccctcacagtctccagggtcttggctcttcccaatcactgccaacttctcaagggattggtaggcttttaaaagggcagtgtcaaggttgaagccctgttgtattccaacccaagaaaagatgagggtgggtggaagggactggaccggttttcaagtacaggttgaatatcccttatccaaaatacttgagaccataagtgttatagattttggattttactatttttttttgagacaggatctcactctcacccaggctggagtgcaatggcaggatcttgggtcactgcagcctccacccactgtgctcaagcaatctttccacctcagcctcccaggtagctgagactataggtgcatgccaccacacctggataatttttgtattttttgtaaagacagggttttgccatgttgtccaggctgatctcaagcaatcctgggctcaagcaatcttctcgccttggcgtcccaaagtgctgggattacaggcatgactcattgcacccaatttctgaatacttgcatatatataatgagatatcttgggacccaagtctaaacacaaaattcatttgtttcatatacacatagcctgataattttgtaaaatattttaaatagtttgtgcatgaaaccaagttattttttttttggagatggggtctcattctgtcacccatgctggagtgcagtggcatggtcatagctcactgcagccttgatcccctggggtcaagcgattctcacctcaatcttccaagtagctgggaccacaggtgtgtgccaccacatctggctaacttttaaattatttgtagagatgaggtcttgctatattgcccaggctggtctcaaactcctgggctcaagtgaacctcccacctcaaccttccaaagtgttgggattataggtgtgagccagtgtccagctgaaacaaagttttgactgcgacctgtcacatgagattaagtgtgggatcttccacttgtggcatcatatgggccctcaaagtttaaattctggagcatttaggattttggattagggatgctgatatagtttggatagttgttccctccaaatctcatgctgaaatttgatgcccgatgttggaggcagggcctaggtggaggtatttgggtcaagggggtgtattcctcatgaatggcttgatgccctccttgtggtagagttttcatgggttatttataagtgcatggcacatctcctcctctcttgctccttctcttgccatgtgatacatctgctccccctctgccttccactatgactggaaacttcctgaggtcctcaccagaaacagatgctagtgccaccctttttgtacagcctgcagaactgtgagctcaataaacttctaagttactcagcctcagatgtttctttgtagcaatgcaaaatggaccaagacagatgttctacctgtatgtggacctggtgcttaaaaaggattattagggagtgttcagtgatactgctggaggtgtgaaaagcagcttgcatactacctttgtccaaatttctcctggttaaaggcataaccatatatatatattgctcagaccagaaatctgaaagtcactattccctttggagattctaccatactatgtatattaaaggctctaaacagtcctgcagtaaataaactggcttcactttatttaacctggtcttgagcatgggatctttatgccccaaaatatctaacaaactatctgaaaaacagtgttctgtgcaatgcactttgggaaacctcaacctatggatcacgtacatgaagtacaagctttctcagatttggctttcagttctgtaactttactgtttgctgctccccaactctaatcatcctcaagttcttctggtttataaaatgtgccacactttcaagcttgtgcctgctgtttcctgaaaggcacatgttctttgtccacctggcaagccctactcatcctccaagtcccaatctaagcataatcacatcatctgtgaaacttcctaaatgctccaaggcaaaataaattgtttactcctgtgtttccagtgcactttattcaaacgttattcactgtattaaaagtaattggtttgaaagctttaccatcctgctggttccttcattgatgagttgtataaatctttggcatatgctcacttaaaaaagtaatgaatttgagacggttttttctactggtgtgtgcacttctcaagatggcaaggacagtaccttatttatctctgtcttcagcaacaatggtcatgcctgccacgtaataggggttgatgtgtttgttgaatgatgatgccccaaacccagggtagatatcctctctctaacttaagataaatagatgattcaggtttgtgagccaaaagtatacaaccaaacatgctcagaacaggttagaactgtgaagatctctttgttctgagataagagattcagaaaaaacacattctactccccagtgccagatgagattcactagtgtctatctgtgtgctgggtgttgtcacccagtgatccagggagacagtaacctgtcttagtggtaggaggaaagtaatagcatttcttaatgtccctgtctgtttatgcaaagccagacaagtaaacagaatcataaagatgtctcagataatgtcacggttaagttgcacccaaacattctcacattccatttgagttgagtttgatgcagcattctgggcaatgtcatttctaccagctaagactgccccaaatctgcccactttcaggagcctgagaatagagaatgctgctcagaaaagttcttttggcaggaggcagagtaaatacgggctctgttcattaaagatcagatgcaagtacacaaaaccaggttcttttttttttttttttttgagacagagtcttgctctgtcgcccaggctggagtacagtggcgcaatctcagctcactgcaacctccgcctcccaggttcaagtgagtctcttgcctcagcctcccgagtagctgggattacagatgtgcatcaccacacccagctaatttttgtgtttttagtagagacggggtttcatcatgttggccaggctggtcttgaactcccgacctcaggtgatccgcctgccttggcctcccaaagtgctgggattacaggcatgagccaccgcgtctggcaaaaccaggttcttttagaacttatttatcacctcctggctgctatccttctagtaggaaaaaagtattgttactgataattattctttgtcattttcatggaagtaagtaaacctaaaaacacagaaaaggggggaaaaaaaaacaagtgagcagcttcttggaagtttaaatgaattgtattctgtggccacatcatgctctattctgatttatagcaatcaagcctcaaaaaaaagacagcaataaatccaatccacatggctcttgtaaaaaggcatctatttggcttttaatacaaaatgatatagagaaatacagaaagaaaatatcatacaagccagttacaaaaaaaaaaaaaaaatcccaaccaacaaatttgtcacattgggcctgcattagaaaacaggaaaaaagaaaaagaaaaaaaaaaacagtccctgaaatctggcaggtggtttttagaggccacagggagcttgccttagtcatcctggtgaaatgggacagaagtggtttttggaatatggccaccgcctcctgtttcttgctagcaatggtcatctgaagggagggtgctagcctggacatccaacatttggcatcacttatgcagtctgaggtctcaaagacaagcggccttggagtcttccagtccatatcttcactgaatctctcccatatacagtctcttgtcactcgatgctgagataactgaggtaaaaagaacagataactagaaataatgaaggctcaaggagacttggtgctcaagggctcttgtgtcaagagccaattctggtataaaagagcaattggacttagcttaaattcccctcctaaacaccatccacaggaaattgtagcctggcttttcaatccaagtcctctaatatcatgaggatgactgtactatgggaaatacattatcagacactaaatactgacatcccttgtcagtcaaaccccaagaaaaagactttcccagtcattctagaagagaggaatctatggctgtgccagtcattttgtaaatgtgcttctgcttgttatacttagccctggagaaagttacagtttctcctttaattcaaggctgaaattatttggtttagccagccaaaaaattttaagctgaaatttatatctaaatattaaaaagtatcattcttggccgggcgcagtggctcacatctgtaatcccagcactttgggaagctgaggcgggtggattaccagaggtcaggagtttgagaccagcctggccaacatggtgaaacctcgtctctactaaaaacacaaaaattaggcaggtgtggtggtgggtgcctgtagtcccagctacttgggaggctgaggcaggagaatcgcttgaacctgggaaggcagaggttgcagtgagccgagatcgtgccactgcactccagcctgggcgacaagagtgagactctgtctcaaaaaaaaaaaaaaaaagtatctttcttttaatcaaatacatcattgaaacagacttgatggaagtaaatttaaaaaaaaattagacttaccaacttccctttgagatcaagaagaaaatggagcattgctcttactctcaccacttatgagcaatggtgagactgacattgatacccacataaagactgtttgcagctgggcacagtggctcacacctgtaatcccagcactttgggaggctgaggcgggtggattactggacgtcaggagttcgtgaccaccctgaccaatgcggtgaaaccccgtctctactaaaaatacaaaaaaaaaaaaaaattagctgggcatggtggtgggtgcctgtaatcccagctgcttgggaggctgaggcaggagaactgcttgaacccaggaggcagaggttgcagtgagccaagattgcaccattgctccaacctgggcaaaacagcgagacactgtctcaaaaacaaaacaaaacaaaacccaacaacaaaaaaaccaacaacaacaacaacaaaaacacccaaaggctgtttgcatggaaattcgtataaaacagatacccgcttttgactctctattcccaggatccctacggggagatttccagtttccctttccccctcgttgggacagacttactgatgggctcatcagggtggaaagccacttcattgatggagccagcatggccgggcagcttatacaatattctcctgcttgtggtatcccacacataaacaaacctgtaaggtatcatgaaaagcaagggtaagtcctcttagagctgggggtaggacagaggcatggctttttaaaggaaatggaagcaacaattatttacttaccttacatttactgaaccatgttctggcttttagaaactaggaacacagagtttgaataagacatggactcacctcttgagcaatggggtggagaaataagaataactaaaaatataagcatgactggcatgtttgaatacaagcttctgaaatgggaaacaccacagggaagaaaagaaagtttttcctgcagacatcacacaaaaacctttttcagagtgtctagtataattaggctacagttaacttcatactcatccaggaaatctaaaaggtaacccaactcatggcagggtgggagcctaggctgctgatccagatgaactttttagtactgtattcaaacagagacctgagaagggacaggaagtgtctggtatataaaatatttatagtgtttgctaacctaatactcacttgagccaacttttccattgaattaacaggcagaaggaatactgaattctagaatgggaaggggccaagagaaatcagcttgtctaggctgggagtggtggctcatgcctgtactcccaacactttgggaggccgaggtgcgtggatcgtcttaggtctggagtttgagaccagcctggccaacaaggtgaaacccagtctctactaaaaatacaaaaaattagccaggagtggtagcgtgtgcctgtaatcccaactactcgggaggctgaggcaggagaattgcctgaacctgggaggtggaggttgcagtgagctgagaccgtggcactgccctctagcctgggtgacagagtgagactccatctccaaaaaaaaaaaaaaaaaaaaaaagaggagaaaaaagaaatcagcttctctaaactccttattttagagataagaaaactggggcacagtgacgtttccaaggcaatacagttcatcaacggcgtaactaaaattagaactcttcaaaaaaaaagagcttattagagaatgttcttaggaagacaaaatttttatttgtcattaaaaaaaattatgaggctgggcatggtggctcacatctgtaatcctagcactttggggggccaaggcttgagctcaggagcttgagaccagcttggacaacatggtaaaaccccatctctacaaaaaaattagccaggtgtagtggtgcatgcctgtggtcccagctacttgggaggccaaggtgggaggactgattgagtccagcacgtagaggctgcagtgagctgagatggcaccactgcaccccagcctgggtgacagagtgagatcctgtctcaagaaaaaaaaaattatgttttttttcatgctgtataataaaggtaatgtaagaggctatagagttttaagcttctttctactgaaatactctgaatactactgaaatactactgaaatactgaaataacacaatgtactttctgcaatgctagaataaataaaaaaaaacttctacatttctcttcaaaagtgatgaataataacagaagatgtcataaaaatgtgattttttccttattcattctatagtattagagccagtatttttatcatcacaggccataattttcacaaaagtctacatattatcacagaatctttttgtttttctcaattaattttttttttttttttttgtagagacagtgtcttcctatgttgttaaggctggtcttgaactcctcgcgtcaagcaatcctcctgccttcacctcccaaagtgctgggatgacgggcatgagccaccatgcgtggcatatggcacaatctgtatgtatttagagagcccctgaaatcaactctgttcctaatcctctgagccaatgatgactttatagccttatcaaactgaagtaaaacttgaagggcaagttgagtgaactgctgagattttatgagctcatctaggctctcctgaagactgtgtcccaaagtagtacttctgtataactgatatgatatggcttaggaagaagaaattgtttttcttattcaagcttgccttgatgtcctgtgctgaaggtttcctgccatggagcagacagaagtgaccaggagcccagcagggggttcctatgttcctgaccacctcttcagtagccacagaaactacagagctgaacccaagactctggagctcttaatatactctcgtattttactttcacttaccctccataaatgtactggctaaaaaaaaaaaaaaaaaaaaaagttcctttgaccctcaatcttgcttaagtcattaaagggtaaagtatagagctattatcttaatctgatgatgtaaaattcatctgttggtaaatataaagggctggtagttttgaagcaggtatttaaaattatttacatattttgttttgtgcaatcaacaactcaccagtacttgatcataaaaatggtacattcaccagtactggattataaaatgcctagttctaatccaacttacacttttggtcaaaaatgcaaataaacaagagcttcttaattatactatttagctgtcatcagctaggctccatagaaagtaagttctgaacaagatggaagagaagcaggaactccatctgtctagactccatggctctgatactcatgcccttcctactgtcttctttcttgtcatgcacaaaaagctggtcctcattaattcaataaagggcagtatggcatagtgaaagagtatgagctctggagtcagaaagactggggttcaagtctcagtgcagctatttactagctaagtaagcttagctcagagaagttaaataattgcagatcatttaacttctctaagcttcttagttacaatgatggagaaaatattgatctcataactttgttgagaaaaataatgaggtaatatatgcaaagtgcctggcacacagaattaattatagctattgttattataagtacactcatcatcaaaacagaatctcatgaagtcaatgggctgaataaatcactcttggccgagagactggtcagccttcccgtagcctataggactattcagagtttcaagtttgaatatgaggaggtgatctgtaagttattagttagtagaaaggagaagtttgccaaatccaggccaagctgaaaaggagttttctgaggatacatttcccaggcacataaaagacagaatcccagatctccaagggtttacacttcaaggtctcactcttgatggctgccaattagatgctaaatttagaggggttccttgccctctccttactttggcatggcaacatttggcaggaaccagaagccttatgtaacacagctgcttcttgacttggggccaattggtgaggtggcctgtcaaatcttgccaacccccagcaggtagagagggataggctttcctcataccacgctttcacatgtgattttgtttttttttaaagagatggggtcttgctctgttgcccaggctggagagcagtggcatgattgcagctcactatatcctcaaactcctgggctcatggggtccttctgcctcagcctaccaagtagctgggactacaggtgcacactactatgcctggctaattttttaaatattttttttatagagacagggtcctgccatcttgcccaggctggtcttgaactcttgggttcaagccatccttccacctcagcctctcagagtgttgggattaaaggtgtgcaccattgaccacatgtaaagtttaaaggaacagtggagaggaaaagagaaaaaaaggacattgcaattcagaaagggccaatgccagaaacaaactgctcatcagaaaaaaaaagtatgtaaatataatttaaaaatttaattacagctgggtgcagtggttcatgactgtaatcccagcactttgggaggccgaggcaggcggatcatgaggtcaggagattgagatcattctggctaacacggtgaaactccatctctactaaaaatacaaaaaactagccaggcgtggtagcgggcacctgtagtcccagctactcgggagtctgaggcaggagaatggtgtaaacccaggaggtggagcttgtagtgagcagagattgcaccactgcactccagcctgggcgacagagtgagactacatctcaaaaacaaacaaaaatttaattacaaaagatacactctttctgctgaaaattatgtaaaaatacttaggatagttcttactatatcagaatatgagacaccttagtctgtttcttgaagtcttctctagcaacttgataacttaaaattctttagatttccctcttctaggcagctctctaaaccacttgcactcaaatgatcaatgtgacactttcacctggaccctttctttttcctccagaaaatacctgaatacttgtccatttttcttggcattaaacttgtcaggaaaaaaaaaagtagactctggaatttaaatatgttcagaattattcattaatagaaaggtatgggacagatcacagtgcagcttctgtgtggcagcgttagggccccaaatagaggaaaaccctggaatatgctgaaagccctggctagcccaagaaagtcttcctatttataggatggtgcttgtttcagtaggattgaaagagaaactctaaaggggaggataggattaagctaaaaagggtcaagacactgcccaatgagagctaaacacaggatttgctgtcagagggtcttattgttctttaccaggcctcatttgcagcccatcagactcgacacctggacatccctattcaacctctgattctcccccaagcacaggttaccacagacatgccaaatacaacagcatctgacagaagaattctctcccttctgtttctcattcagcacataatgcctgagccagtttagattcgtatttcataaagccttagccgattaattcagcatggggtggaaaatacctagttcacattttgttacaccctgcacctagcaatcattgcacttcccactaacccagacacagctctgaatcatctccaacacaggcaggcattaccaatagctgagctgctatgcagggtaaaattggactgccattcttcagctaggaattcattcatgtaatataaactaattggttagaaaagctcaagcactgacaacagtgccatgggttcacagaaatgactaagattcattccctaatctctaggagaaaataacttagtggaggtacctcactttgtctgtctgattgtaagatgtaataaatgctaccaaagtttagatgtatgaaatgggattacagcacaaagaacaattagttatctccaagaggtaatagagagaggggaccagggacagtttatggatgtaacatagaggtggttactagagagatataggagtttagataatgaagagggaatgtgagagagaacctagaggtgagaacgcaaaaggaggttagaatatgaaaattccatgtgcgcagcattgtggtgatggtgggggaggtgggtatttaatatgtgttcaaatgaactgaagcatggaataagaaatgtggtgagggaaactagagacagattatgagactgaattttattctgatggcaaagggaacccaacagaatcaaacaaattgttgatcctctaggtctaaaatgtctccaaagtgggtagaaatgatctgtttgtcgaacacggttttgaaacccttcatactgcacagagcttcatcttcaagcacagtcataactctatgtctgctctagctccatatccacgctttatgtataaaacacaagaagacatcctgcatagctatatcattgttttttttttggagatggagtctcgctcttgctgcccgggctggagcagtgcaacggcgtgatctcggctcaccgcaacctctgcctcccaggttcaagtcattctcttgcctaagcctcctgagtagctgggattacaggcatgtgccgccacgcccggctaattttgtatttttagtagggatggggtttctccatgttggtcaggctggtctcgaactgacctcaggtgatctgcccgcctcggcctcccaaagtgctgggattgcaggcacgagccaccgcatccggccagctacatcattctttactttgcacccactaatccttacctgtcggctgagccagctgctattttgcttccatcaggtgaccaagaacatctcagaaggttctatgataaacaagaatccactgaatagtaatataccaaactcctctttgcaaggctaccgaatcactaagaggctttaaatttcctaactagagttttaattactcttctcaggaagatggtctgtaattatcttatattctatggcccaaaacagcatactttgttattttacaccatataaaaactgtagaaaatacttaacttacagttaattagattgaacctggcaacaaaattttgttctacttataaatggaggctccctttgctccatttatcttgatactcattttttttcctatttatcttgaagaaaaatacacgcaaacccaacaaataataaattttgggttttttttttttttgagacagggtctcgctctcttgtccaagctggagtacagtggcacaatcatagctcactgtagttttgacctcctgggcccaagtgatcctcccacttcagcctcccaagcagctgagactgcaggcacatgccaccacacccagattttttatcttttgtagagacagggtcttactatgttgccctggctggtctctaactcctggcctcccaccttggcttcccaaagtgctgggattacagctgtgagccaccatgccaggtctaaaaaacaaaatttgatttatacagtgaaactgaatctcaatgagctctcaaaaaaaaaaatctctattaacaaattctctgaggggaaaagcttctttcaatagagctgaccttgaaatttgaggctttgaaaaaaattttctctctcagaacttgggccgtggtagttactgagggaagagatgtattcttagggttctaacacacatggtcacgggatgcggaggcaggtagggagaccatccaggttacagctatgggagcttgggttccatatggaaaactgatttaggagggtaaaattcccaagtaattaaaaaggccaggagtctcttgttgaggctggtgtcaagtcagatgccctcagtttgagggctggctccattccttttgggctatatgactggcttctccccagtcactattatttctatccgttttatttttggcaacaagttttaattaagagcagtgttattggaatgaagtccattcttagcagagctactgctctctatccttagtaccaccttaaatgtttctctgaagtaaatgaacagtaaaactcctctgccatgcagaactcaccttttcaaagttgtgcacatttccttgaaatatctttacacatctctctttgggggcaaatggccggacatcccagacacgaactgcaaaacaaatccaaataaacaaaccaaccaaaacaactatcggccagaggcctcctgggcacccagctgaaattagtatcatgtcaatcaatggcagatgctgtttcctcggtgggcaaagtccaacttgacatactgctacctgttaaggctcttttctttttcaagcaggaaaacacatctaaatcccaataactggggctagctgagggggcaggaaggaaaaatgtcacacacaatgttggtaatttgcaacagaatgcagttgggtgtgatactaatttcaaaaagatattttgcaagatttctctgccagcttagtcacatccagcaaagcttcaatgtgacaaactaaataccaggaactactgtgacaatgaacttataaaagccaaacttacatcgccctttcctaatttccctcatatgggcacctgatagtctaagactggacaaggtcagatatatataaaatatataaaaggtcaaataaatcaaaaaagcactgtaccataccaaaaatcagaaaaagtaaacattgattctatctctgttacatatttgggtgatgtcaggtaaacagtgagattgtttgtgtcttggtttttctgttctgtaaaatgaagagaaaattatctgtcttctttttaaaataatattattgactgatatgattgagatggagtttcgctcttgttgcctagcctggagtgcagtggcgtgatctcggctcactgcaacctccgcctcccagattcaagtgattctcctgcctcagcctcccaagtagctgggattacaggtgcccaccaccacacctggctaatttttgtatttttagtagagatggggtttcaccacattggccaggctggtctcaaactcctgacctcaggtgatctaccctgcccagccaataacactattttaaagatccaatgagatgatatatgtgcaaaggttctaaaatttgtaggcaacaaacaaaaataaagaatttgtaattgtattatgcagccacaagaaattattctattattttttccttattttagtatcaatctaggaaacctcattgttcctcataaagaacgctagaattagctaggcatggtacttgggaggcttgcctgggcccaggagtttgagaccagcctgggcaacacagcaagatcctgtcttatcaaaaaaattaaggaaaaaatatttttttaatgctagattaaatgtgtataaacatctattgtaagcagtagctatagccgttgtaactgaagctatacctatagtggaatttcagtgatgtcattttatttgagtatgaaaaaagtattatcaatccttggagtcagacaggcataaaaaggcaaagctatgcgtgaaagtttgccattgagaatatagttaaaaggtaaagatgtccattaattcaacaaatatttattaagtacccaatgaatgtcaggtattgtttttgttacaaaatgtcagggaatacattttagttcctgacaagcctataattttgtataccagggccatttccaaactccctcaacattaagcatataatccagcaagtcaccttactttttttctgtagtaacccatcctcccaccctacaactcaaaaacaagtaaagagaaagagcaagagtgtgttcgtgtaaatccagaatgttttaatgaagacctcttcccacaccaatgctttcagagtggggagggaagacagactggcaggaaagagcagaagagatcatccaagcttggtgctctctgaaaacgcacaagaactgccttgaatagacttctagattcacatctttttcattaaactcatcacctagagtttctaatatcctgttggatacacagcataccagagctgagatgggtcttaaaggtaaagtccaatcttcttatcaatgtagaaactgatgcctagagagaagaaatgctgtgtgcaaagttgttcagggacaagacagagatctgagactacagtcctagattcttgactatctcacctaaagctttccccattacaacacattctaatcgtctgatggaatctgtgagcaatctttgactttttccttggatcctgggagagatttcctttccaaagttacctgtattgtccattgcattggacaaaagataagagccttcagaacttaaactcaggccagtcactgaatctgcatggcctctcatggtgtaggttagcttgttctggcgcaggtcccagacctgcaaaaacagaaaggtgcccccagaaatcaaattaataaaagcagagaaagagaatgacacaagagacaagagtcaattgcccagagacactgatattactctactataaaacacaggatttctgtcaaagagaaaaacacctttttttaattttcattttttttttgagacagcgtctcactctgttgcccagtgcagtggcactatcatggctcgctgtagccttgacttcccgggctcaggtgattctcccatctaagcctccccagtagctgggactacaggagcatgctactatacccagctaatttttctgaagagacaggtttcaccatgttgcccaggctagtcttgaactcccgagctcaagcaatcctcccacctcatcctctcagtatttggattaacacgcatgagccactatgcctggccaatctctgtctttctaaaaaggtagctcaggctaccacgtttgactagataaatataaacgaatgcatatcaaatgttaagataaagttttacacacaaaaaaatagaattcagaaaggttattttcaaatcatagcaaagaaaaactattatagaaaaaaactaaaaatggctatgattcttagccattaaaaattattataaatacataaaacgaacatgtcatttaaaaaaggcattatgattacatgtttgtgtaacaatatgaaaaatacagatgcttaaaatttttcttttaatgtaacaatatgtgacaataaatgtatatatatgtacatgtatggatatgtacatgcacatacactatggaaaagcacatttattaaaataaaaataaattacaggttcactattgcttgtataggaaacgtaagatacagaaaataacctaaacgtcaagcaggaaaaataggtggtttattaaattatggttcataagcacattgcaaaactgaattctcatacaggagatagcatgacagagtagaaagagtggtgacttagggtaagaataaactgttccttgccacttagagttatgtgtcattgggtcactaattctttctgggcctgtttcctggtctgtaagattagggataacaatagctacttcttacggctgttgtaaggattataagaatgcttagcatatgccgggcacaagacaggtcctcaataatgtgtagctattgttaagcagttcctaaaaataactcagaagaccaaatgtaaaaatatttacataataagctattaagcaaaaaaggaaaatacaaaacagtatttatctttacacagactacagctatgtaaaataaatattttcaagctaacagaaatagtctggaaagtcacatggcaaaaagaacagtaattttgttaaggtcactggtattacataaaatacaaattttcccccaattttatttcatattgcaatgtagtttttttctaagtgaataaaacttttgctgttccttaaatcaagacacttttccttatctagaaatgagttaggtgttacacagcagagcaatacatagggcagacaactccactttctccatcagtaactcactcatgtgtggagcccaacacattttctatacgatcatttttttatatcaagatgtttgctgcttcagtaatcaggaaagcctgaagtatctgacattttgttcaagctgttgttccttctcttctgagaaggcactgttgaaatctagctttgtaacaactaggagagaatgcattttgccaacccctcacagaacttgtgtgttatttccaaacttcccccttgaggcctgtacaccttgtttgtgcagggccaaaaaagtatccaggatttgccacaaaaaaaatctacagcaggggtggctcactcctgtaattccagcactttgggaggccaaggtggttggatcacctgaggtcaggagttcaagaccagcctggccatggtgaaaccccgtctctactaaaaatacaaaaaattagccgggcatggtggtgcacacctgtaatcccagctactcgggaggctgaggcagaagaatcacttgaacccgggaggcggaggctgcagtgagccgagatcacacaactgcattccagcctgggcaacaagaataaaactctgtctcaaaaaaaaaaatctacagcaggaatttaagcaaaacattttgcaagtatcctactcagctgttcaatgaaaaatctgggcatctgattagtggcaggtactgctggagattaaaaaaagacatggccctgctcacaaggagtgttcagtataacaaggaaaacttaagacgtttaaacaagtaatgacaggcctatgcaaggtacagttgcatacgggtcagagggtttagctctggtggaacagagatgagagtgagaaagggaagctttcacagaaaatgaagcacctgagcagggtctggaagaaggaagtttttttttgtttttgttttttttttaacttagacaaagtggaagggtatttactaggacaagataatttatggaagtagaggggcatgaaaaacactgctggattgtaggagattaggcacccagaggcagcagatgatgaggtagacaggcagaggccagctcatgaaaggttttgaatgcctggcttgcactttatttccttcactggggggtcaaagaagggttcaaaatagaaaaatgagacattcagttgtatattctggaaagatccttctgacccattgattaactgattgattgagaccgagtctccctctgttgccaggctggagtgcagtggtgcaatctcggctcactgcaacctctgcctcccgggttcaagtgattctcctccctcagcctccagagtagctgggactacaggcgcgcaccaccacacccagctaatttttgtattttcagcagagatggggtttcaccatgttggccatggccaggatggtctcgatctcttgaccttgtgatccgcccacctcagcctcccgaagtgctgggattacaggcttgagtcaccgcgcctggcctggcctatatatttaataactgaagggatgagacctcctaaagtgcagggattacaaacatgagccactacacctggcctaatctatccttttaaccattacattaaaaaaaaaaaaaaaaaaaaccaaactgaactcccatcctaactagagttcaggattacaagaaacgccagattgccagccagaccatcaggctctcaagtgacacattttcttctttcttcattttcctctgactccccaatcctattaccaggtaggaagttccaagagattggtgggaacagcattatctgctcacaaatatacacagaatttgtttaactcagattttaaaaagggttcccactccttatttgtttctctttcttagaacaggcagtgctacctaagatagactgagaaacaaataaaaaccaggctctctgaggagcatctcctaatatagtgaggcagtatggtgatttgtcacacaagggctcaagactggtaagcctctaggtgcttaaaaggtgcttgttaattgactagaggtaacaagacagagtggcaagactattagccctctagagatagagctctggtcccgtctctaccactgactgagtgatgactatttgatcttggccagatcacttaacctcttagggcctcacttcagtcacctataaagtgagggatggaggtgatgtctacggttcttttcaggtttgacatttcctgagtctttctgattgaaaaggagcctctcctttgcatgtttaaagaaatttatgaggtcttttaggacaactaagagtcttcctgagttcgagagagcaattactctcccctctgcatgtaacaacagggtatttttttttctaatcaggacagagtctcactctgtcatctggagtgcagtggtgcaatcttggctagctgcaacctccacctcccgggttcaagcgattctcgtgcctcaggctcccaagtagctgggactacaggtgtgtgccaccacgcgcagctaatttttgtatttttagtagagacggggttttgccacgttggccaggctggtctggaactcccggcctcaagtgatctgcccgccttggcctcccaaagtactaggataacaggcatgagccacagtgcctggccatcagcagggtatttttaatagggaaaagactaccttctaagtaaattctaacacatatacaactctctccagtccatctctgttatacaagagcaaaaataaagaaataattctagcaacctggtttcaaacattgtattaactgctcctgccagaaaacaatatggcagcctgtatcccaaatatgaaacatccttatacttattaaaacacattaattttcatctggaaatctattctaagaaaacaaatacagaaaaagtttcatgcacaaatatgtccatagcagcataatctgtgataatgattcacatgaaacagcctaaatgtccaatgacatggttgtcactaaattatttaatactgtaataataaaaaaatgatgatgataatggcagctgacatatattgaacacactatgtccctgccacggtgctaggaatattatatccttacttcatttaattaatgtaacaattatatgaggtgagctgacaattcccatttagacacaagaaatggagatgaggttaaaacaacttttttaagatcacaaagctagcaattaattggcaaattgcaaaatgatcccaacttcgcttaagcacaggaattcaaggttacagtgagctatgattccaccaccacattgcagcctgggcaacacgagtgagacctcaaaataaagcaaaaaaatggaaaggaaaatgattctaactacaattctaagaaaataagaatgatttgatagagagcaactagaggtgggcttagttaaggatatactttccagaagagatatctatgctgtgatctgaagataagaggcaagtcacagcaatgcatcaaaggtgggggtgggggattcctgacaaaggagcagctatgtgataataagtgaaaagagatcatggctgggcacagtggctcatgcctgtaatcccaacactttgggaggccaaggagggaggactgcttgaggccaggagttcgagaccagcctgggcaatgtgttgagaacccatttctaaaaaaacaaaaacgaaaacgaaccaaactggccaggcgtggtggctcactcctgtaatcccagcactttgggaggctgaggtgggcggatcacctgaggtcaggagttctagaacagtctggtcaacatggtgaaaccatgtctctactaaaaatacaaaatattagtgggacgtggtggcggctgcctgtaatcccagctactcgggaggctgaggcaggagaatcacttgagtccgggaggtggaggttgcagtgagctgagattgtgccattgcgctccagcctgggcaacaagagtgaaactccgtctcaaaaaaaaaaaatttagctgggcatagtggcatgtacctatagtcccagctacttgggaggctgaggtgagagaattgcttgagcccagaaggtcatggcagcagtgagccatgattgcaccactgcactccagcctcggcagagcgagactctctcttgaaaaaagaaaaaaagcatcatctaaagaatgaatattataatgtttacatacaaaacattgtagtacagaaaagacttgaaggaagtacactgtgaaatagtaagagtgactgaatttggatgatgaaactacagtgacttatctatttttataattcttttacattttctgcactttaatatacaaagtatcacttttattactaaatctattttaattgtaattaattgttaataatgttattcccaataaagttgatttgttaaacatatatttgaatgcaaattttatatctgcataaaacatttaaggtaaataagcagacaaattaggaaaagtctatactgattttttgtttagaaaagagaatacaatatatacagtacacaaacaaggagactgtctcagtgctgggtgcacttctaattaaaaaaattccccgaaaatgaagcattggcagaaaaatttgaatgtttgtggacggattaaacgctttttagcttttttttaatgctttgagacagggtctctctctgtcgtctaggctggagtgcagtggcacgatcttggctcaccacaacccccaccaccctggttcaagccagtcttgtgcctcagcctcttgagtagctgggattacaggcgcatgccaccatgcctggttaatttttgtatttttagtagagacggggttttgccatgttggccaggctggtctagaactcctgaccttaagtgatccgcctgccttggcctctcaaagtgtttggattacaggcgtgagccaacacgcccagcaaacactttttagtttactatcaccaacagagtactgaacaattttcatcaccccaaaaatttcctaatttttctcctttgtgtcaaacctcttcatccctaacatttgctgattattgatctcttctttgccctatgattttttttgagaatataaggaatcctatacatatatataaaaccttttgaggctagcttcttttatttaagctgtgagaatttgtgctgtatagcactattgtctttagaaggcccaggaacagtccagataaagagcccaaagtaagccatactattgacagtaagtagactttactagcacaagagtattattgttaggttagtctatcctcacagtggagacgagggcatcaatcaaatttggtactctgttggtggtagtgaatctatgcaaacattaaaattcttataactgtacaccaaaaatgtttatttcactgtatgtaaatttacatgtcttgaaaagtataaaagttatcatagcttgatgacattaatctattttcatgtgtacaagaagtcttctagtgattctgacgccagtgagctcccaactccattctgggaaatattgtgcacagctattaaagttgatctaagtttccatgttctgattcttcattctccaagtatttatatgatggaaaagggatgggaagttcaattttggaaaacctgaattcttaggtacctatgagacattcaaatgggggatactgtacagctagttgtacacaaggacctgatgcttaagatctggggtgggaaaattgtcttcggcagagggatgatggagttgtggaagtagacgagatctgtcttggggaatgtacacagcgagaaaagcaaaggcccttggcgaataatgatgtttaaagactccacagacagagtagctcataatggtatgtagagaaggagaagaaactaccagatggataggacagtttgttgtcacagaactcagggaagagagaagaccaggtctatggtacagagcgattatgttaaaaaacaaaaacacatacaaaaaacaaaaaaaaaaaccagactattaggaatgaagaatgaatggtatgtgaggaactgaagacagtgagtgcagaaaaatctccagggtattcctctaagtattaagagtataattctagaatgaaactctgggatttgaactgaggttccatcacgtattagctgtgtaacctgggtttaagctgttgtgcctcttttagctcagtttcctcatctgtacaatcgcatcagtaggatttatttcatgaggttgtaaggtcaaagtctttaagatccgtgaggaggtcaatagcaaagcttaaatgaattaatgatgtaaagctctgagaacaacaactggcagaaagtaagcactatgtgttagataatgatgataacaatattatcaccaccaccatcatcatcctttttaagaagttttgggccaggcatggtggctcatgcctgtaatcccactttgggaggccaaggcgggtggatcacctgaggtcaggagttcgagaccagcctgaccaacacagagaaaccctgtctctaccaaaaatacaaaattagccaggcatggtggcacacgcctgtagtcccagctactcaggaggctgaggcaagagaattgcttgaacccaggaggcagaagttgcagtgagccaagatcacgccactgcattcaagtctgggcgacagagtgagactctgtctcaaaaaaaagaaaagtagaaaagaagaggttgaaagaagtgacgaaggattgaaaccctcacatttaaaggactacctttaggccgggcacggtggctcacacccgtaatcccagcactttgggaggccgaggcaggtggatcacaaggtcaggagttcgagataagcctgcccaacatggtgaaaccctgtctctactaaaaaatacaaaaattagctgggcatggtggcacgtgcctgtaatcccagctactcaggaggctgaggcaggagaattgcttgaactgggacccaggaggcagaggttgcagtgagctgagatagcaccactgcactccagcctgggctacagaggaagactctgactcaaaaaaaaaaaaaaaaaaaaaggactacctttagacaaaagcaaggatattcctttctttttttttttggagatggagtcttgctccgtggccaggctggagtgcagtggcgtgatctcagctcaccgcaacttctgactcccaggttcaagtaatctcctgccttagcctcctgagtagctgggattacaggcacaccaccatcacatccagctaatttttgtattttcagtagagacgaggtttcaccacattggccaggacggtctcggtctcctgaccttgtgatccacccgcctcggcctcccaaagtgcagggatttcaggtgtgagccaccacacctggccaaaagcaaggatatttcatccaaagtaacagcaaaggaaacaatgagggatggaaatacagtacaacttctaggtaaggacaacacagaaagttgagtatctgacagttactcttcttactataaagcagaaggtaaggtcaaagtcgttaagatccccaaggaagccaagaggaaaggaagacagaagctgtgcaggcccaaaataatacatttcctggcacttgttatgtccaggaattctgctaagtgctctaatgaatcaggctcatttaatccccacaatggtatgtggtagatgctactgtttttttttttttttatcattaccccctcaccattcacacaagaaaaagaggcttaaagaaggtgcttgaagtcacaaaactagaaaatggtgaaactgggattagaacccaagtcaattacttgaaagtttgagctacactctactgccatatggtctattgcctctttaatatcattaccttctctcattcttagagaaacttagaaaactctctttccatagtgtcaaaaagaaaaacacagtgagagatgaggatacagaatcacaaactgattcactgctctctttaaaccaagatggttaaaaaaagattttgaatgtctttaaaaggaaatgcactctttattttttacatagtccccctacagagacttcacacttcacattaagtgcctggtccctgacagcatttataagatctgcaatgcaaactttaatttaggaagtcaatgaagacaggagaaaaagaaaataagttccaagttactattttcctttcagttggtattaagtgcaaagctaccacaatctcagaagtttgaaaaaattcgtttctaagtgcagatagatgaaatggaaatatatcataaacatcaaacataccttgatatcattgtctattccaccagaaataatctgatcacttgtgtcattgaaggtcacagctaacacctggtacgtgttctgaaatgtctggatggctgctttcttccggatgtcccaaagctgaagcaaaggacaagacagtctatcagcaacatcattctaagaagcaattgcacagtacaaatatcccttaagtacgaggactttgtggacatgaacacatctataattgggatcctatatcactaactcctggatatcctaataacacacatggtaagcagtgtgctcaattttgccaagacatttgaaggctggtgaaacaaaacttcggttatattttcagacttctttgttgaagtgaacagagttaaatcaacatactcttagaatggaattcccctaactacttagttcatatattttttagaacaacaaggatatcagacaattttttcaaaccgtagagactaattcattagtaggctgcaacccacatttaaaaaaatagagggtatgtcagtgaaaatagtataataaacaatgacaaaagcttgtccctccacgaaagcagcaaattaaccagcaaaatctgtcagaatcaactgttggaactctcaaaactaatcaaaagtttatagtaacccggcaaacccttaatgaggaaaaaggaaacaaaaaactccctgagtcccagtaaaagggctttgtagtgttttaacttgtgctggctctgtctcctgctcagcaacagctttgaagataacccatattcccagtatggtttcctagtactgaggaagcaaagggggcctatttcttattgtcaaagaataaacaataaaaattgtttatttttacctgtctggtggctctctgaaggatgagcccaaaggacttacatttattttgcctaacttggaacttcccttgaaaacatttaaaggaaaggacattattagcctctggttcctgggggcaaggaaaaacagttggggcaaaaatacaaaccaaaaaccttgggaggaagggctggggaaggagacaatttggggaataagagcttcgaaaagcaccgacatattcctggctatctatctatctatgtatctatctatctatctatctatctatctatctatctatctaatctggggacacactctccctctgtcgcctaggctatctatctatctatctatctatctatctatctatctatctatctatctatctatctttctatcatctatatctatctatctatgtatctatgtgtctatctatctatctaatctctatctatctatctatctagggacagactctccctctgtcacccaggccggagtgcggtggtgcgatcttggctcactgcaacctccacctcacgggctcaagcaattctcatgtctcagcctcccgagtaggtgggattacaggcgtgtgccactatgcccagctaatttttgtatttttagtagagacagggtttcgccacgttgaccaggctggtctcaaactcctggcctcaagtgatctgtctgcctcaccctcccaaagtgctaagattacaggcatgagccaccacgcctggcccattcctggcaatctagaccacttgcatgtccagggctgggcacatacttagaaaagatctgagaaggccgtaagctctctggttcaccttcaggctctgcacaagcaggaagtgaaagctaaggagagatgtaaactgcatggcaaggagttgaaggcaggctccaacatacaaaaagacaatctgcaaagactgggagaatttttgttcttgttgttgtaggtaatttaggaaacttgtgtcattcactagctgaccactaagctaacgaaaaaaagaattcagtggtcacacaggacaaagaatacaaactttacaaaattagttcaaaaattcactaaacaggccgggcatggtggcttacacctgtaatcccagcattttgggaggccgaggtggatggatcacttgaggtcaggagttcaagaccagcgtggctaacatggtaaaaccttgtttctactaaaaatacaaaaattagctggtcatggtggtgtgcccctgtaaccccagctactcaggaagctgaggtgcaagaatcacttgaacccggggagtggaggttgcagtgagccaagatcgcactactgcactccagcctgggctacagagcgagacttcgtctcaaaaaccaaccaaccaaccactctcaccttaccccaacccacagaaagtcactaaacaaacaactacaataagcagctctggggacctaatttccagagtcaccacgctataatatttaaatgcctagttttcaacaaaatataaggcatgcaaagaagcaagtaactatggtccatatagaaggaaaaagtagtcttctcaacaaattgtgctaagacaactggctaaccacatgccaaagaatgaaggtaagcccctgcctaacatgatacacaaaaattaattcaacatggatcaaggacctaaatgtaagagctaaaactataaaattcttagagggccaggtatggtggctcatgcctgtaaccccagcactttcggaggccgaggccaggaggatggctttagcccagagttagcgaccagcctgagcaacatggtgattcctcatctctacaaaataaaaacaaaaagttgggtgtggtggtatatgcctatagtcccagctacttgggaggctgagatgggaggatcgcttgggccagagaggttgaggctgcagtgagccgtgattgcggatctgtactccagcctgggtgagagtggcggcatctcggctcactgcaacctctgcttccgtgttccagcaattctcctgctttagcctcctggatagctgggattacaggcatgcgccaccacgcccagctaatttttctatttttagaagagacgggggtttcaccatgttggccaggctggtctcgaactcctgacctcaggtgatccacccaccttggcctcccaaagtggtgggattacaggcgtgagccactgcacccggccaagaccccatctcttaaacaaacaaacccttatagctctacttttttaaagcgtggataacacagagagggctcagagatgtttcaataaatgaatgacacacttgagaagatgaaccacaagtaaatgatttaaaagtatgggtcgtttcattcagaagaaagagactttgggatgactgttccaagttttaaagggctggcatcaaaaagaaaggaatcagccatggaactttagggaaggtcataggcttaacttcaatcctgtagtcaacaaggagagtctgagtaggatctgtgccaagatgcctcttcctcccaattctcatggtttaggatgaaaagtagtttcttctttgttcatgtaaatacgaactaaaaattagttcattactcagataaatggtctaaaaagaacgcttcactcctctcctacatgcccaacatctcctactcccccaactcctgtggttacagaatcaagtccaaacttcttaacctggaattcaaggccttaataatttagatcctatatattttataaactgtactataatctttgtctcaatagatacttcactcaggtcaaatctatctttgtctttctcctaaaagtcatggtagtcaaagtttgtttaaaataatttagaattttagttccagataactaccacttttaataattattttactttgaagcaatcataaatttatagaaaacttggaagtaaaaagaacactttttttggtctaaatcatttgagagtaagttgcttacccaatgccttatcaccttttttttttttttgagatgggagtctcactctgtctgttgctcattctggagtgcagtggcgtgatctccgctcactgcaacctccacctcccgggttcaagcaattcttcctcagcctcctgagtagctggtattacaggcatctgccaccatgcccggcttttttgtatttttagtagagacagggtttcttcaagttggccaggctggtttcaaactcccgacctcaagtgatccacctgcctaggcctcccaaagtgctaggattacaggcataagccactgcacctggccccttatcactcctaaatagtgtctgtcctacaaagatgttctcctacatcatctcaacataaccatcaaaatcaagaaatacagatacactatcaccattttatcctcaaatcccactcaagttttaccagttatcccaaatgtcttattgcacaaggattcagtctggaatcatatgttaaatttagactccagtctgcaagactctctcaaactttccttgagttttatgaactcaacacttctgaaagttacaggtcatcatccccaatttaggtttgtcttatgtttcctcttgattagatttaagttatacatctttggtaggaatatcacagaaatgatgctgcatctttgttgtatcctagcaaatggttcatgattttgtcttgtcccattactaattaggtcgatttgataatttagttaggatgttcttttgacaaaataagccttgacaagtacaaggcttatcttgtactttcactgcccctgggctgaaataggagccctggttccttttaatggaaaacagtacctgtgcagtaaggggtgctattgctattggggtcttgttgctcctaaaccttttcagtggacagtcaggcaatatatgtacatttaggtacacacacacacacactcacacatttatgtctatttttttctatatgtttctatattgaatattgtgagttcacacttatacctcacacaagattcattttagtcttctcttttgtactggtaactctgttcttggacagagaaatcagcctcccattaaattcaatatattcacttatttgattatgcttcctgcatgcaaccagtttcccatattctcttccacccttccctacttgaattgtgattcccattcttggttgaagccatgtgtgactcttccttaaccaacttgggtcattcctctgtgtgaacaccctcatcactctgctacggctcttttccagtctgcacttctccaagcatgcagtcatcatcttgctcagtctcagactccctacaccaaatcatttctaccctgtgtggatgccctcagttcaggctttgacatccacattctccccgtactgcttcacgtacaggcgaccctttcaccccattagggcactgttgggctgctgcccctccctcaccctcaaattccccacactggttacctaccctgtgttgtatggatgccttcctcactctctgactactccctacaatgtactgccctgcccagtgtggatgctctccttaccacacttgtgctctgacactctactctgggccaccttggcccatctctaactagagcaccttccctgctttggcctatataactggctttaggactgaactgctcatgaaagggaaatttatatatatatgagtacatacacacatacacgcagtatttcacttaattttattagaagaatgcacttgataaaaagtttgaaaacgatctgtatgaataatgcccagaatgcttttagactaaaaatgcaagtgctgttggaaacctttgctttctgttaagaactctgacatgtaaaaagcaacatgactttttttcctcttaaactgaagttattcaattcctgtacttgcaacctagtaacaaaaatacaagaacacaaagcattccaacttcacaagtaactgaaaagtacattgcaaaaagctgtttaatgatgccttaaatataaatatactgacattaaaaataggagctggttaaaaagcagtcatctttaggtgatgtgacatactgcttattaaaaaaagtattaacttgagtaataaggtaaaaataactattccaaatcatgtttaattaaggcagaagagaagcaaaaaaccaaaagaaggcagacagaaaggacatatactctttttctactacctaaatagttcctagatatttattacagcaggccctcaataataatgttaacaaaattcactggggcatttccacctcttactatcttctgaaatgacaattagtaaatcagctactgttaagactctccaactacagtgacatctaggtcagagctctggtttagaaaccaatcttaaacaacagactctcctcccatccaaccatcaaggggccccaagtgattaggtataagaaaaccactcagtagaaaaacgtctcagccaagtgtggtggctcacgcctgtaatcccagcactttgggaggccgaggggggcggatcacaaggtcaggagtttgagaccagcctggccaatatgatgaacccctgcctctactgaaaatacaaaaactagctgggcgtggtatgggtccctgtagtcccagctactagggaggctgaggcaggggaactgcttgaacccaggaggtagaggttgcagtgagctgagattgcgccactgcactccagcctgggcaacatggtgaaaccccatctctaccaaaaatagaaaaattaggcaggtatggtggtgtgcacctgtaatcccagctactcaagaggctgaggctggggaatcacttgaacccgggaggtggaggctacagtgagccaagattgtgccactgcactccagcctgggcgatagagcaagaccctgtctcaaagaaaaaaaaaaaaaagcaaattcattaattcatttaaaaagcaataagaagtatgggggtgtagtttcccagatgtactcttttgaagtccctcactgtttaacaattaaaatataaaccagagcccaaaattcgtgtcaaagagagaatcaaatggttggtactatgatgtactgtgtccttgtgtgcctctgagataaattattatttctaggcctcagtttccttatttataaaatgaggatgctcagtgagatcagtggctcccagaatgtgagactggctacactgaatcacttgaaggacacattaaaatatctgattcccattgcagatccactgaaccagattctttgggtatttttaacaggttcttcaggtgatgatgatataaagataggctggcaaccatctgactaaacgatgtttaagttcccatcttgtgccatactaaaactattcactgaactttttatatattgtctataatctcagaacagccttttttttttttttgctacctccctgttggtggagatactcataacagccttgaaagacacgtatattactgtcacagttcttttttttgagacagagtctcgctctgtcgcccaggctggagtgcagtggtgcaatctctgcaagctccacctcccgggtgcacaccattctcctgcctcagcctcccaagcaactggaactacaggtgcccgccatcacgcccggcttattttttgtatttttagtagagacggggtttcaccgtgttagccaggatggtcttgatctcttgacctcgtgatccacccgcctcggcctcccaaagtgctgggattacaggcgtaagccacagcacccggcctatttcaagtaacaatttattctatggttctattattattctgtagggtaattaaaacttgtattaaatgttttattttaaatggggaaaaatttcaagtgtgttatgggagatgactgctaaaattaagttttgcacaggaagctagagtacaagtggcaaggcaagataaggttcacatcacatcacctcagaaactggaacacggagagacaatacccaccttaactgtgccatcgtcactgccagtgcagacaagctgagggcctctcctggctggataacaggaattcacaaaggaagtatgtccctttagccttttaaccctctcacctgtttcactatcccacacagccacggttttatctgtggatgctgagaaaagcatactagaaagtaagagaaagaataaaaaagaaataagtgaagataaacagtaacaatctatctttcctacttgacaaaaggtgccaaatttttcaagatcactgacctgctgtgctacgccagtttgcccatgatgctggaatgcctcaccctaccaaaatcctatttgtcctctaggcccagatggcccagataaaagatctacccctgtgaagtttaaaaaattccccttctttgagtccccatgacatacatctaatgtagcagtttgctctatcttttcctcttttgtgatagctaacattttaaacataagacaccctctcacttggaaatgtttaataactccctggtgctgcagagatcagacagactgtggtaccgacctgacagctgagtgactccaatcttttctctttaccaaagtttttcttttgtctctgaggacaatttctttctttcattttttttttgagatgagatcttgctctgtcacccgggttggaatcatggctcactgcagcctcgacctcctgggctcaagtgatcctcccacctcagcctcctgagtagctgggaccacaggtctgtgccaccatgctcagttaatttttaaaaatcatttgtagaggcaaggtctcactatgttgcccaggctggtcttgaactgggctcaagcaatcttcctgcctcagcctcctacagtgctagggttataggcgtaagcaaccacgcccagcctctgaggatgatttctaagttataactgatcttataatgctttcttttttcattttttttgagatggagtctcactgtgttgcccaggctggttttgaactcttgggctccaggaatcctcctgcctcagcctcccaaatagctgggattataagcacatgccaccaggcccagctttctaatgctttatttaaaatgtatacaatgctatgtatcaattgatggagcaccctaagattttagaggtcagaaatgtaaaacaatgaatgtttaccagactacctaacaatgtaattacttttgtatagccagatttctatattatctataatatattctaaaataatatagtcattaaaatgacgtttatgacatcagatgttggctgagcaatgttaagagaaaaaaggagcaaataagattgtacacacagttctggccaggtgcggtggctcacacttgtaatcccagcattttgggaggccaaggcgggcggatcacaaggtcaggagatcgagaccatcctggctaacacggtgaaaccccatctctattaaaaatacaaaaaaattagccgggcatggtggcgggcacctgtaatcccagctactcaggaggctgaggcaggagaatggtgtgaaccccggagacggagcttgcagtgagccgagatcgcaccactgcactccagactgggcgacagagcaagactccgtctcaaaaaaataaaataaaataaataaataaataaaaaagattgtacacatagttctaacaaatatgcaacaactaaacagttctgagtagaaaaaaaggcattagaaaaatgtataaaattaacagtgattggccaggcacggtggctcatgcctgtaatcccagcactttgggaggctgaggtgggcggatcacctgcggttgggagttcaagaccagcctgaccaacatggagaaacccagtctctacaaaaaatacaaaattagccaggcacggtgatgcatccctgtaatcccagctattctggaggctgaggcaagagaaacacgtgaacctgggaggcggaggttgcagtgagccgagatcgtgccattgcactccagcctgggcaacaagagtgaaattccgtctcaaaaaaaaaaaattaacactgattatctttggagtggtagaaatatagactattttttcatctttctgctttttttggtttctcaaaagaaatgatttttataatagaaatagctgatttcaggccaggcatggtggttaattattgtaatcacagcatttttgggaggctgaggcaggtggactgcttgagctcaggagcaatatagcaagaccatgtctccacaaatgatttttaaaaattagctgggcatggaggcgtgggcttgtggccccagctatttgggaggctgaagtgggaggatccctcgagcaagaggttgaggctgcagtgagccatgtttgtgtcactgcactccagcctacatataaaaatcacatttattttatgtcttaaaaaaagaaaaatttgtctgggttgttgaaatgaccgatgtaacatctttatatttgcatacacagactataaacacctcacttggggtgacagtgataaatcggatactaaagtagctacccaaaattagtagtttttgatagcagggtctcctgagaaaggatgaaaggtgaaaggacgccaagaattagtatgagaagctgtccttccattatgcagaatactcacctgccatctgtgttgtaatgcaattccatcactgctccactgtgtcccttcagtgtggcatagttatcacagtcaccatagacattccacagtactgttagggagatgggttctgtgagcattactaggcaaagggtacttataaatttatcagaacaacagttctcaggtcaggcacggtggctcacacctgtaatcccagcactttgggaggccgagacgggtggatcacttgaggtcaggagttcgagaccagcgtggctgatacggcgaaaccccatctttaataaaaataaaaaaatcagccaggtgtagtggcagacgcctacaatcccagctcttgggagactgaggcaggagaatcacttgaacccaggagacggaggatgcagtgagccgagatcgcgccacggcactccaacctgggtgacagagtgagactccgtctctaaaaagccaaccgaccaaccaaacaaaaaaaactatgtagtttgtctgatgaaattaagcctatcaataattcatatatgttctgcaaagatccctaagcaatccagacgtttggccactagtaagcttaaggatcatagagccggaacatccaaatcaaaatgggcagtgaagacgggtatcatccacccggcaccgaggaaaagagttaacagaaaagagccaaataactcatttcatctcataatctggcaagaaagtagcaacagaagcatctgattttttttccttctggcttcatttgctggagtataaataaaacgactttttctacttacttctcaaaaatgggtatgagaaattcttatttctcaaaaatggaaatctggtagtagatcctaatgatgtacaggtagattatttaagggagttaccactttaggattccttccttcccatatgctagctaggattctgggtgtgaattaagaggaccttatacctttgggaaaataaaagttatttctctcctcattactgccattaacctgttatgtctagattgctaagtgccttggtaaattagctggagatttgcctctatgaggaagacattctcaaaccagaacaactcactttccaactagtaaaataatggcttctgtatttaccccatggactccaagttctacacccaagatcattcagcatgttcatgccccaattttagcatattagccatgcagcctgttatgttgccaacatagagtgataccttctgtggcacccaagatttaaaaaaaaaaatcactatctggcaggaaaaattattccagattcaaaaactatgcctcacatatcagtcggtcaaatcctgcagatgctaaggtggatccgttggggtggaacttgcagcagtagacttccccttcatgtccagagagcagcatgattggggcttgaagggaggaacatcttggaggtccctaaacaaaagagaagcacaaggtaactactgcatacagacaaaggaggctacaaaattagggggtggggagtggagggaaaagaccaagaaaacaatgattaagtgggtttcatctgacttacagaatggtagctcttctcatatgaatgcctccaacttgacactctctgaaactttccattatctacctgttataatgactctcttgttcactctctcagctcttgttgtacgaccaacttttttttggagatagggtctcactctgtcacctaggctggactgcagtagtgtgatcatggttcactgcagcttcaaactccttggctcaagtgatcctcctgcctcagcctcctgagtagccaggactacaggcatgaactagcatgccatgctaatttttttagtttttgtggagatgaggtcttgctacgttgcctaggctggtctcaaaatcctggcctccctccttggcctcccaaagcactaagattataggaatgagccaccacatttggcctggctcatttaacaaatgatggaactgactttcccaacaactctgcttggtatggagtactgggtgaaatagttttgttttatttttaattttttttgtgtgttttgagacagagttttgctctgtcacccaggctggagtgcagtggtgtgatctcggctcactgcaacctatgctttctgggttcaagggatctggtgcctcagcctcccgagcagccaagattacaggcatgcacaaccacgcccggctaatttttgtatttttagtagagatggggtttcaccatgttggccaggctggtctcaaactcctggcctcatgtgatctgcctgccttggcctcccagagtgctgggattataggcatgagccactgcacctggcctatttttatttcttattttttcatagcaaacggatcctcagcatgggtgaagtagttttgattatggtcttggacaccaagatgacacttgggcaattcatctaaacatgggctgatatgctcacttgtcaaatgggagaagtatactacccataatccccaaatctcttcagtacttcccagcattttcatatttatttatttatttatttattttttggggaaggagtcttgctctgttgcccaggctggagtacaatggcgtgatctcgtctcatcgcaaactccgcctcctgggttcaagcgattctcctgcatcagcctcccgagtggctgggattacaggcacccaccaccaagcccggccagattcatttagttttaaaaaatgttatgtgcaggctgggcgcggtggctcacacctgtaatcccagcactttgggaggctgaggtgggcggatcacttgaggtcaaaagtttgagaccagcctgaccaacatggtgaaactccgtctctactaaaaatatacaaaaattagccaggcatggtggcgggcgcctgtaattccagccactcaggaggctgaggcaggagaatcgcttgaacccgggtggcggaggttgcggtgcaccgagattgcgccactccactccagcctgggtgacaagagcaaaattccatcttaaaaaaaaaaaaaagaagttacgtgctaggcactgggcaaacagcaatgaacaaaataaacaatggagctcgctgttccagtgggaaagggggaagggagaagggaaggtgagagaaaacaagcaaactatatatgtggtgtcatgtgctatagagcaaaagaagggatggggatggtggctcatgcctgtaatctcagcattttgggaggccaaggtgtgcggattgcttgagctcaggagtgaaatcctgtctctacaaaaaaatacaattagttagatgtggtggtgtgtgtctgtggtcccagctactcaggaggctgaggcaggaggatcacttgagcccaggtggtggaggctgtactgagccagtggtcaacacagagagattgtctaaaaacaaaaaaacaaaaaaagagagagagagaagcaatgtgggttccacagtatgtggtactgcaatttaaaatagggtggtcaggaaaatcctcactgaaaaaattacatttgggcaaatattcgcaggagctgaatagtaaaccatgtaaacatttgtgaagagcaatcccacagagaggacagcaaatgcaaaggtcctgaagcagaggcttggaagagagagtaactgaagccaggtgagcaataagaaattggtcagagaggtaaagggaaagagggcaaataattacaagaattttggtttttactctggatgaagtacaaagccaccagaaagttttctgcagagtgtaatgtgatctgatgtttagaaggattcctttggttattggcttggtaacaggtgctgatacaaaggtagaaagtggaagaccagttagggtcccactacaaaaatgccagatgagataataatggcttaggccatgaggcaatgatggagatggtagaagtagcaattctagacctattttgaggacggtgccagcaggatttattgaggagatgtgaggacactcgtatttcctcgtctgagcctaaacaggacattagaagtgtgatcactatttctatcttacaaaaaatgtagttaggagcatggtttctcagttcgaaatctgcttctatcacgtacttggtaagtctgtttttccatctgcaaaatgggttaataacgttcctaacaggctgctaccaagatcaatggaaatttcatatacgaaacactttagtacaagagtcaatgaatgttagctgctatttagttgttaataatactagtgcagagaaataaagggaaaagcaacttgcccaaagtcccaaaacgagccaacacaaatcatttcccttttttcttccctccctcattcattcattctacacactcttcggaatttttgttctatgccagatccatgttagagtcaggatgcttaaacccgggtcagggttttgagcccaaggtcctcaactctaattctaatgctatctcagggcagtcgagaggctgaaaacgggcgccaaacgggggaacacgtacgcagcattcgcaggctatggggagcttttacagtgtttatgtgctttaactctgcgtagaaactctcgttctgcccccgcaatgcgggaaagggtcagggatcaccagatacagcgctctgaggggaggaagatgagctgagggccaaaggccgcctgcttcttcacttaccgcttgcagcaaggctcccggcgtcgcctgctgctgcccggctcctgggccagaccccgctcccaacagcaactcatgccgctgccgcttgactggaaccagcggcaactctgggcccttacgcttctgctgttctatcatggcggcaaccggtctcttcagcgccgccactgaccgcgctgccgctctcaggcgccacgcaattggttccaaattagtccttcctccacaacttccagcttggaagaaccaatcggctttcaatatttccatttgcaccgccctcggatagtctcttgttattgggcatatctttctgacgtcatgagagtgcgataccaggattggtggacggagctggcgaccgccctaggcgcgctgggtcttgtgggtggaaacgcgctggctgactggggtcggcgtttagttcagcgcagcgactcggggacctggagctgacgcctagtacgtatgaggaagaacggggtgggtggctgcctgagtctggaggcgacgcctcggttgtgcagtctgaacctgcccttctcagctgagggtgctgacagcaaggggtgggaggcgggccccgagtccccagctgtggtaagtagtagcctgggctccctttcggggcaggagcggagccttggggtctctggcggcaagacccagcccctgcggctcccttcttcaagagcgcccatcgtggccagtcctgtgccgggcattcccagggagaaaggcctgcgtcccagcctcctccggtgccccatttggccgaggaggctgacttgtttctgccactgattttgcagtttttgatcagggcctactgtatgcccccctgagagagacagtgatgaaggaaatgtccgactccttctccagagcacagtcttgttgagaaatttgagactcatgcccatgaacgtggtcattgcctcagtcgtcctgctgatattcatttagcagcgcgttgggggtatgttgtgaaccgggcacggtccctactctcagggcgtttaactctggtggggaaaacgttaaacaatgacctcactaatacatggaaatgcctcctactgctgcctgatgctatgagtgcctgaaataagcaggaaggtttttcagaggaaaagatgcctgcgctggtagctgcaggaagtgttgtaattaattaggtgaagaagtgaaggcagaaccttccatagagaactacttgttcagagccctgaggcacttgggaggaaaatgactaaaagcacaaagagccagtgtggctggtacaaagagaatgaagggagtatggtacaagatgaagctgtacgtgatagcggtcagaccttgcaggaatttgtagcttttattttaaaacggatgagataccactgagccgtcttcccccagtggggtgtggtggaggaggggacttgatccctcaggctcagtggtgtgaacagacgggggttggggaagccctagtcgatgtatgtggaccacttgggatatgcagtaatcctggtcagagatgtcagtgaggactgagatatgggtggaactgcagagaattggacagattctagaggtatataggaggtaaaatgggtgggacttggtgatgggttgattttagggagtgaagagaggaatcaaaggtaactcctaggtttctggcttatgtagttgaatagatggtggtaccattcactcactatcacggaatccctcaagctggatagggaacactagaagatgattagagaccagtttttttttgttttttttttttttttgagacaggttcttgctctgtcgcccaggctggagtgtggtggtgcaaccttggctcactgcaacctccacctcccaggttcaagcaattctcctgccttagcctccccagtagctgggattacaggcgcctccactgtgcccggccaatttttgtatttttggtggagatggggttccaccatattggccaggctggtctccaactcctggcctcaagtgatccacctgcctcagcctcccaaaattctgggattacaggcctgagccactgctcccagctgagatcagtttttattgattgattgattgattgtgtggggtcattcatgacatccaagaggcagtttgaaatacagctttgtgctcagaagagagatttgtgttgggaatataaaattgggcataatttgtatatacatgaattgagccataggtgtgggtaaggtcagctaagtcagaaccttgactagttccaacatttaatggtgaagaacaggtgaacctacaggagatacagaagaaaggaaggaggactggaagaatgtctcagaagcaaaagaatgatttgtgatagaaatttctagaatttaaataacatgaagattgaaaaacatattttggcttttatcatcatggaggtcacagtaaccttagcaagagttattttgttggtgtgattgggccaaaagccagatatgaggcaaggatttggacaagaaaatgtaggtagtgaacctacacagtatttttcatagatctgattgtaaagaggaggagaggatgtgctaaccgatggggataagggattatccaggatccagttgaggatccagttttgagaaatttgagaatattgtagaagatttgaaagtcactgtggagtgtgggagaatgaggttactagagaaatgtaggatgcaaggaaaaaaaaaatttttttccagcatatccagcggtttagtgcatgcatggagaaaacctttctgggtatggcaaggacatcgcttgctcaagacacattctaacctctaatatgtcttctcttcctgaaaaatctggaaaactaaaaaccattttcttgactcccttgcacctaaggtgaaaattgaatttggaactgagttaaatgtggaaagaaggagggtgtgagtcatccagttttgctgccagtcatggcagtaaatttctccagtcaatagctccctggtttggtggcttgctgcagtgatagccataactttcctggattgtggcaaaggtggtattattttgtgggttaggtgttgttcctggaagttctgccaaagtcttttattgcaatacatcccttactgcttaagtgggttctgttgtctgcaactgtccctgaccaggttagaggtactgccagagagttaaatataaagacagagttaaagggagtttagggtgttgttggaatgatgggctatggaatctaagctggattggaagaaaactgaagaaaaaggggagggctgatagattggaagaaaatagaggccaataaatcagggttctaatgaggtcaaagaacagtattctctgctagaggatttctgtttatcctaaaaggcttattcagttatctgtttaacttctctacttcccccagaccctctttctcttcctagctactacttttgtttgtttgttttgagacagtcttactctgttgcccaggccgattgcagtggcatgattatggctcactgtagcctcgacctcccaggctccagtgatcctcccacctcagcctctccagtaggtgggataacaggtatgtgccaccatgcctggctaattgttgtattttttatagagataaggtcttgccatgttgtccaggctggtctcaaactcctggcctcaagtgatcttgctgccttggtctcccaaagtgctacgattataggcataagccaccatgcctggcccccaagcttctgctttagcacttatcacattgcagtgtaattggtgttattttgtgggttaggtgttgttcctggaagttccgccaaagtctgttattgcaatacatccctttctgcttaagtgggttctgttgtctgcaactgtcccgggctaggttagacatactgccagatagttaaatataaagacagagttaaagggagtttagagtgttgttggaatgatgatatctgatatccctatcagattaggaggtctttgagaacagggactgtgttgaaaagggtggtttaggccgggtgctgtggctcactcctataatcccagcactttgggaggccgaggcaggtggatcacctgaggtcaggagttcgagaccatcctgaccaatatggtgaaaccctgtctctactaaaaatataaaaatcagctgggcatggtggtgtgtgcctgtaatcccagctactcgggaggctgaggcaggagaatcgcttgaacctgggaggaggttgcagtgagctaagatcgcgccattgcactctagcctgggtgacaagaacaaaactctgtctcaaaaaaaaaaaaagaaaaaaaagggtggtttagtggcaagtgtgtgtggcccttggaatggcctaagatttgtctctttcttgctgtgttgttttggacaagttatttcattcctgtaaaataggattacttgctttgtagaggagttttagggattgaaagcaggtttataaagtaccttatatataaacatcaatcaatagcatactgaattgatgaattaacaatttaaatggggtaaaattaaatacttcactattttagtagacaatttccatgtgtgttacactgtgctaggcactggagatttggggaggaaggatatgatgatgtgcaagacaaaggcatgcttacaagagttccacactctacaaagggaggaaaaaaatgtccctaaaaatgatttgaatcccatccccatcattcatattttgcaatcttgagcgagtttacttagcttctcttgtgtcctcatttttaaaatggcaatgataattgcctgttttatgggatagtcaagaagagaattattgaatgtcatgaagataaaattttaaaaagaaaaattagttaagagaagtaaagctcttagattaatacatggcagatatgaagcactcaaatattagctattataagactttgaagggatcttaggaataattgactgaaagtgtagtgtcgagtggtagaataagtgctgatcctggggtcttataccaatgttgctaactgtgagcagcctttgtcaaatcacttggcttcattttcagtggcctaagagtaataggtttaattatttccataattcctttaagtttttacattttctgagttcatcttttgtgtttttcctggcattttactattcctctttcctgcttttggctattttctcaacaggtccacgactggaatttgaaagcaagaagcatctatcttacatggtcactctagaatttggtgggagggaggaaagttggaccaccagtttgacatttgaaagtgtcccggccgggtgcggtggttcacacctgtaatcctaacactttgggaggccgaggcgagcagatcacttgaggtcaggagtttgagaccaacctggccaacatggtgaaaccatgtctctactaaaagtacacaaattagctgggcatggtgttgcatgcctgtagtcccagctacttgggaggcagaggtgacagaatcacttgaacccgggaagtggaggttgcagtgagtcgagatcgcaccactgccctccagcctgggcaacagagcgagactccatcttaaaaaaaaagaaaaaagaagtgttccatctgttgatctgtccaacatattaaatgggacctagctccttcttcttctatatcctttagaccagaatgtgttcccccctctttctctacctgtgcttggcatatagtgaggctcagttcactcatttaaaaaaaactgagtacttgtagtataccagaccccaggaacacaaaatcaaatgagaaatggtccttggtttcatgtttgaatgaatggatccagacgttgctcatcctagctcttccatgaatgatatccacattgattcctctaatgttgggacctagttagtgttagagctatattctacaaaatttagatttagaccgtgtattagcccattttcacactgctctaaagaactccctgagactgggtaattataaaggagaaaggtttaattgactcacagttctgaattgctggggagtcctcaggaaacttataactcatggcagaaggtgaaggggaagcaaggcacgtcttaagtggtgtcagaggagagagagagagagcaagagaaactgccacatttaaaccatcagatctcgtgaaaactctgtcactatcatgagaacagactgtgggaaactgccatgatccagtcacctcccactaggtccctcccccaacatgtggggattacagttcaagatgaaatttgggtgaggacacaaagccaaaccatattcgattgtgaattctttttgaggtatagtgcttaagaatgcaggctcttggccgggtgccatggctcatgcctgtaatctcagcactttgggaggctgaggtaggaggattgcttgagccaggagttcaagaccagactgggcaacataatgaaatccagtctctaccccccctcaaaaaaaaaaaaaattagccaagctcgttggtgtgtttctgtcccagctacttgggaggctgaggcgggaggatagcttgagcccaggaggtcaaggctgcagggagccatgtttggaccattgcactccggcctggacaacagagtgagaccctgcctcaaaacaaaaaacaaagcaaacagtgcaggctctggagtcattattctgtctctgttcatatcctagtagttttagttagcttactttgctcacaattccagcacagcttaaagataaactaaaattcctttaaattcttagggttctagtcaattagtactcaagtaacaaaaaaatctaaatccaaacaagctggaaaatgataacaacaaaaatcttgaccaggtcagtaaggtgacacattaaatgaagttccaaaaaggctataaaatgtctggccaatttaatattgttctttaaacttttcattgcttgggggataggaggacaggatgtgtagggtttttttcccagttgcatgtgtactttaaaatttttttttgaaactatcacataattatggaagcatgtacagataacatttttctgaattatttgagttaaattgctgacccaataccccaacagccctgaaaactttttttcctacaaacaaggacattctcctctatagccacagtgtaattaccaacattatgaaattaacattgcattacttctttgatcctcaggccccacctcttgatgctcgagctctgactacccattctgggctgctccagtgtgtgccttcatcaccttattcttccctatattgcagttctctttgtagatttcctcctcacccagcttagactctgacctcactctgggccaccatttcttctcctgtatcctttacttccatcccatactttcctttctctgtcccttgttttggaaagagagtggctagtaattggtcccctgttgcttccctatgtaacacagttgtttaaaacatgcaagcaaaatgctttgttctgcattcagagctattgcaaggcaactccaaatggtgtacctcaatccttgtcgacttactggctcttttaagtgtatgaatgtggtcctgtctgactgactgtatctatcttaatgttatatactcttttttttttttctttctgagacagagtctctgttgcccagggtggagttgcccagggtggagtgcagtggcatgatctcggctcgctgcaacctccacctcccatgttcaagtggttctcctgtctcagtctcccgagtagctgggattacaggtgcccaccacaatgcccagctaatttttgtatttttagtagagatggggtttcatcgtgttgcccaggctattctcgaactcctgggctctagtgatccacccgccatggcctcccaaagtgctggtattaacaggtgtgagccaccgtgcctggctcaatgttatatactcttattttttttttttagacggactctcgctctgtcgcccaggctggagtacaatggtacgatcttggttcactgcaagctccacctcccaggttcatgccattctcctgcctcagcctgccgagtagctgggattacaggtgcccgctgccacgcctggctaattatttgtatttttagtagagatggagtttcactgtgttagccaggatggtcttgatctcctgacctcgtgatccacctgcctcagcctcccaaagtgctgggattacaggcgtgagccaccacgcacggctgtatactctttaaaagtagcagaactctttttttttccaagtgaaatcttacacagaattttaatatgtaaactggatcaaagcagaatacgttgttacagtaggcacccttgcagtaattctcactcactccccctttcactgtggcccaccataaggttgggagattaactgtgaatcagtaataattgacctttgcctaattactgaggagaggcttctacccaactgctctgagtgggacttctcccagctctagtttctttgggggttctactccctcagcctttggtatggaggctcacctctggttggttgacttagaggcagcctcactggtctgggaccttgtggtgacctagatatttcagagttgactttttttttttaatttcttttttttgagacagggtttcattttgtcttctaggctggagtgcagtggtatgatcacggctcagtgcactctccatctcttgggctcaagtgatcctcctgcctcagcctcctgagtagctgggacaataggcaggtgccactatgccgagctaatttattttattttttgtatttttagtagagatagggttttaccgtgttgtccaggctggtcttgaactcctgacctcaagcgatccacccaccttggccttccaaagtgctgggatacaggcgtgagccaccatgcccggccataattttcttttcttttttttaaaaaatattttgtggagatggggtgtcgctgtgttgcccaggctggcctcgaacttctggtctcaagcattccttccacctcagccttccaaagtgctggaattacaggtgtggactactgtacctggcctggaagttgactttttaaaaataaatttggattaactaaggagcctctgagtaaccgcaatagaaccctcggtttctacagaatttgaaaaaaagttttatattccatatttaaaaaatgacaaccatttactttcctgaaattgtaaacctgttatagtcatacccccttgttcatgggggatacattccaagacccccattggatccctaaaattgtgggcactgctgaacccagttgctatcaattggaagacgtttctgtttgtattttctacccacaaatttaatgccttctccatcttaactaagcacttatcatacactgtggctataactttagcagtttgaggtgcaacagcaaaactaacatgaatgtttttttcttcctcacaatttcagacatcgaagattcattcttactatagatcttagcaaccttagcatacaattttttttttccccttgagaactttcaccctttcacttaaaggaagcagtttacagcttctctttggtataccaaaattgccagcattactactctgcttcgtggccattattaagtaaagaaaggattatttgaacacaagcagagatacttcaacagtcagtctgataaccaagatggctactatgtgactaatgggcacttaatatacactgagtgactagtgtatgcagcatggatacgctggacaaaggggatgattcatatcccagatggaacagagtgggatggcacaagatttcatcacactaataagaacaacataacagttttaagcttatgaattgtttatttctggaatttttcatttggtgtttttggaccgtggtagactgtgagtaactgcaactgtggaaagtacaactgtggatgggaggactactgtactgttatatttcaggctttccctcaaaaatgcatgccagtttttttttgagataaggtctcactgtgtcgcccaggctggattgcattggcatgatcgtacctcactgcagccttgatctccttggctcaagcgatcctcttgcttcagcctcccaagtagctgggattataggctggtgtcaccacacctggctgattttttttctttttttctttttgagacggagtcttgctctgtcaccaggctagactatagtggggccatctcggctcactgcagtctccgcctcccgggttcaagcaattctcctgcctcagcctcccaagtagctgggactacaggtgcgcaccaccatgcctagctaatttttgtatttttagtagagacggggtttcactatgttggccgggatggtctcgaactcttgaccttgtgatccacccgccttggcctcccaaagcgctgggattacaggcgtgagccactgtgcctggctgattttttttttttttaagtagagatagagtctcactgtgttgtccaggctggtcttgaactcctggcctcaagtgatcctcccgccttagcttcccacgattacagtcgtgagccactgcacctggccccagtttccttcttgaagaattgcatggggtttcttaggccactgttctacaagaggtataaatctgggagcattaaacctagctttttgtatgcttatcacagcagaagtctgtaagcaacaatgtaagttcatttctgctttagactttttttttttttttgagatggaatcttgctctgttgcccaggctggagtgcagtggcccaatcttggcccactgcagcctccacctcaccggttcaagtgattctcctgcctccagagtagctgggattacaggcgcctgccatcacgcctggctgatttttgttgtttttttttttttggagacggagtctcactgtgtcatcaggctggagtgcagtggcacaatctcggctcactgcaacctctgcctcctgggttcaagcaattcccctgcctcagcctcccaagtagttgggaccacaggtgtgcaccaccatgcccggctcattttttgtattttagtagagatggggtttcaccgtgttggccaggctggtctcgaactcctgacctcagatgatccacccgccttggcctcccaaagtgctgggattacaggcgtgagccactgcacctggcctatgacctttgtgtgtagagtaacagatgatagattaagatgtttgaagttaatttagatgtttcagctgctggtgcccctatggattctgtacctcactaatacgtttcaagtgttggagggataataaaagtctcctgatagaacctgatagattagtaactcctgttctagcatgtgaggtgagggatactggacagagggaaaggacaggctagagatgagattgtattgctatgaaatggaagaggcaggatttaaccagaatgtaaaacttggaattaacctgtttatgagctatttctcaagaactgacaaatctgcctgtattagctctgtgtacttttagtacagtaataaaaagacactttggctgacctaagcagaaaagggcaagtttagtataaggatataagattatcttagggagcttgaggacagggatgttcctgagctgtgggataatactagaacaagggtttggatgtcctgaaaggattttctttcatttctgtttcaagtgaagctgtcaatttaatggatggtcattgtaaatcgggaatacttaccaaaatcaggacatcaagtcatcctctgaaagtgaaaggaagcagtgggggttgaggagagaagaaagtatttacctgtgaaaacacaagaaaaataatttcaggtcttactggtgtcaaatgtaattgggaggaaagagaactgaggatagtaccattagatttatcttggcagtgatttatccaacagagtaaagaggcatgtttaagagccgctagattgctggtttcccctctgtttaagatcaggaggctgagcaagattatctctaaggtaagtatccaaagctgtaagttttgctacttaggcagtatcagtgtcacctagtagctggttgaaaatgcattatctcaggtaacacctcagacctactgaactgcaatctgcattttcacataattcagaaatagttaaatgaatttggtacatccaacaatggattattaggtacgtgttaacaaaaagttgtgtatgcgtatgaattgctgtagtaagaaaatgatttcatgattccattaaaaaaccacttctacatataaaaaaactgtaagaatatagatcaaattgaattacaggtgatttcattttctttattattaatgtattatctgaatttttttattatctgaactttcacagtgtgtatgtgttttaattttatcaagaaaaaaaaagtaagcccttttctctttgaagtcacttcagatttaataccttagcatagtagttaagagaatggactctggagtcagccagtttgactccccatttcctggctttttgacatgcttagtaatttaacttctggaagcctttgttctctcatctgtataatataatagtaatagaacttacattttaagagttttgagaattgttttgttttgtttttgagatggagttcgctctgttccttagtctggggtgcagtggtgtgatctctcactgcagcctctgcctcccaggttcaagtgattctcctccctcagcctcccaagtagctgggactacaggctcctgccactatgcctggctaatttttgtatttttagtagagatgggatttcgctatgttggccaggctggtctggaactcctgatcctgagatcgtccgacctcagcaaccacagtgctgggattacaggtgtgagccaccatacccagcctgagttttgagaattaaacgagattgcatgtctagtgcttagcacagtgcctggacatagtaagtgctgcattaatgtttttatttctgttattccatttttttgagatccggtcaaacatacttaacatcttttcccaccctcccccaaaattcttccccggcaaaaaaaatagcaaaaatagcaatttaaaaaaaccaaacacaacaaaattagtagcctaatggccttgggtaagtaacaaattgttgagaaataggatcaaggtttccaaaactccccacaattagaataaacaaaagagatttggataaaagtgtatggtgttaaatctagtggtattattctgtagagaatagctgtggattgtctgcatattcatttctttaatgcagatatctctctaattggtgtctgatttctttatgacaggacacttgtattagctttaatagaagagaaatggaggagccatagaatattaaggatgaattcaggaaggcctgagaccatggaaaacttgcctgctctctacactattttccaaggagaggtatattcttttgtgctttgaaaacccaccatttatgttaaaatagattaagggtgacaactgggtttgttgttcctgtccacttaagtctgtcttgagcattacagcttaaatgggaagggccagcggaacatctggcaatcacatgtgccttctctaagctccagatatttaagtgcgtagttgacatcgtcattggaataccagcatgtgtaatttatgttttaaaatgaatttattttttcactgctgtggtttgaatgtgtcccctaaaaagcatgttttggaaacttaatctccagtgcatcaacgttgggaggtaggacctagtaggaggtatttagttcttgagggctccaccctcctgaagggattaatgccaattactgaaaggcttgaggctgtgagtttgatctctttctctccttcttaccctcttaccttccaccatgggatgacacaacaagaagattcttgccagatgctggcaccttgctcttggactttccaacctccagaactatgagccaaataaatttcatttctttataaattatccagtctctggtattctgttaaagtaacacagaacatactgagacactcaaaaaattgtttctcttctagatgttttcacctcaacaaatagaaccactatcctgcaggttcccagactacacatctggccatcacccttgatttctcttcttgatttgattttgattttccctcccactccagtctatttgcaagtcctaattatatctctggtctatgtacttctttatccccttggcaccctattagttaaaactctctatctcttgcctggtctttactgggatccctgcttcatcgtagctcctctccagtctgttcttcacattgtagctagcataagatttttgtttttgtttttgttttttaattcttttttaaaaattgagctggggtctcactatgttgcccaggctggtctcaaactcctgggcttaagtgatactcccacttcagcctcccagagtcctggggttacaggcatgagccattgtgcttggcctagaataagatttttaaagtaggttggacatgttgctttctcacggctcttcagaagcttctcattacaattgaatacagacatggaccttccacagcttgcccctgggtgctctcacaatgttgtttgttctaccctgctcgtagtcaagacacactggcctccttaatagctttgaacagtctgagttcttgctctctctttaggatttgtgcacatgctgttttctttttagtctgtgctgctataacaaaatacctgagattgggtaatttataaagaacagaaatttatttctcacagttctggaggctgggaaatctaagatcaagttgtcagcagatttggtgtctagtgaagactactctgtttccaagatggcaccttcctgctgcatcctctggagggaagaaatgctgtgtcctcacatgacggaagggacagaaggagcgaactcaccctttcgagcccttttatgaggcactcatccattcatgaggggcctaagggccccacctcttgataccattgaattggggattaggcttcaaagtgaatattggagaaataccaaagttcatgttgaactttagtcccccccgtgggggtattaagaggtggtattaagaagtattaatcacttgggaagtggttaagtcatgaaggctctgcccttgtaaatgtgattaatgcccttatagaagaggctacagagagctgcctggcccctccattccttctgctgtgtgaagacacagcatttgtcacctccaaaggacacaggaataaggtgccatcttggaagcagacagtgagcccttatcaaacacaaaatctgctggcaccttgatcttgaacttcccagcctccagaattgtgagaaataaatttctacggtattttgttatagcagcaccaacagactaagacactcttccttttaactacccactttcccatcatcttgtattcatcctttaggtctcagccctaatgtctcctcagaattttttttacccatcataaataaatcggttcacactgtatttaattatatacttgtttaatgtctatcttcctcacaggacactaagctccatgagggctgagttgtgtctgttttgttgtatatctcagtcttaggtggatgggtagaaaatagtaagtgcttgatacatttttgatgaccgaatgaattatcaacctttggtagagaaggcatatttgtttcaagagcagaggctttgaaaccagacaaaatcgggattctagtcccagctctttttgcttgctatgtgagcctttagggtgtcacttaatctctttgaacctcagttttcttgtttgttaaatggaggttccatttattcacagtaattctcttccatagaattactgtgatggttaaataagctatcatctataagaatacaatgcctgagacatagtaggaattaattaatgttggctccctcctcttgaagtgaaagtaaagccaaaaaattgttttcagtgtcttacaagagcatgtagtttgcttgttcatttgtttgagacagagttttgctcttgttgcccaggttggagtgcaatggtgtgatctcagctcactgcaactgctcactgcaacctccacctcccaggttcaagcaattctcctgcctcagcctcctaagtagctgggattacaggcgcccaccaccacacccagctaaattttgtacttttagtagagacaaggtttcaccatgttggccaggctagtctcctgacctcaggtgatccacctgcctcggcctcccaaagtgctgggattacaggtgtgagccaccacactgggcctcttttttttttttttttttttcttttttttgagacaagatctcactctgttgcccaggctggactgcaatggtgtgatttggctaactgcaacttccacctcctgggttttaagtgatcctcccactcagcccccgaggtagctgggactacaggcacacaccacaacacctggctaatttttctgtagagacaaggtctcactatgttgcccaggctggtcttttgaactcctgagctcaagtgatctgcccacctcagcctcccaaagtgctgggatcaggcgtgagccatcgcacctggcctgagcctatagtattttaatggtatcatttatacttgatattcatacttggcattcatacttgctttatatggttgacaaaagttttacatcctaataatgtgaggtcttggagggcagactttgtgattatcagtcagttatagataattgtggctcttgacttctgttaagttgatcccaacttgtaatataacagtcaagatacaaagtataataccattttaacacatagcaaacagctctgctctttaaagcctctgtcctttttctttatggctcatggtatccccaaaggttagtaaggtaccggagctcagaagaaggaagtgtagcactggaggtgaaactgatttttctgatcatgaagccctcactcatcaggtgctgcccaaaagaaagggaagaacactctgccctccacagaataactcggatttctaaagtggatcctaacctacagctcgctcttttcttttctcttctcttctcttctttctcttttttttttttggacagagtctcactctgtcactcaggctggagtgcagtggtgcaatctcggctcactgcaacctccacctccgggttcaagtgattctcctgcctaagcctccagagtagcagggactacaggcgtcagccaccacgcccggctaattttttgtatttttagtagagacagagtttcgccatgttggccaggctgacttcaaactcctgacctcaggtgatccacccacctcggcctcccaaagtgctgggattacaggtgtgagccactgtgcctggccacctacagctttcttatatgagatggagcttgaattagtgcaggttttatatattactatcaaggatggatggtctttaggaatgttcagagagaactttatagttctaacttactatttcagtagcatattttgaaaagggatggtttagaagtgacttggagttagggaaagagaaatacgataaattggaaagaagaaacttttcagaatattcatccaataaacatttaatgagtacccaatatttacaaagaagaggagttacattaaaattgaaaaaaaaaaaaaaaggtgtaagcctaatctatgccagcactttcacacattctgtcttattgaatctctccaaagaaattgttaactctatttgatagatagggagactcttctcagaagttaagtaatcgcctagggattaataaatggcaaagctaggattctaaatcaggtcctctttccaagtttactttctgctaaactgcagctggggttgtgcaattgtacataaatgtgtggaggaaccaaaagacccatgagaattcttttttttttaagatggagtcttcctctgtcgctcaggctggagtgcagtgggttcaagcgattctcatgcctcaacctcctgaatagctgggattacaggcgcatgccaccacacctggctaatttttgtatttttagtagagatgggttttcaccatgttgaccaggctggtctcgaactcctgacctcaagtgatccatctgccttggcctcccaaagtgctgggattatagatgtgagccaccgcacccagccaagagaattcttttgactgaattgagttataggaggaatatagataaatttggtggttctacagtcatttgttggtacaactctgttacagcatttatcctggtctgtcttgtattattattacttgtatgtgtctctctccactactagatcgtgagttactgtagagcagaggccatgattgtctcatatgtcttggtaactacttcaaatttatttaaaatgactgggcatcccttttttaaagttgtctttatttcatagtacctgacatggtatcttgtacatagtagataggtgcttaaaatggagcccaagcctcacaggactagttgtccttgaagaaggtggtgtttcagcccatgtcccagctcttctcttgctgaacttagcagggatttgggacctagtaattaaatagctgagaagccagtattcatcctgtcatcctctgagaagcatgttggtagcagagtgcattatattaatacatggtaggaggtacgagcatagcaatgagacttgggatttggcttaggcttgccatagcccaagaaatgctgaggggagattcatgttggtaaggtcgaaatagcattggactagaagtaaaaaaaaagtctgtgttgtacttggctgtgctactatctttgtgacttttgacaagtaacttatgcccctgagcctcaaattcttcatttacattatggtgacaacaagtttcaaggccatttgccacctataatctgaagatgggaaatttactttacccaagctctaatgaattcagttgagatagttactgaattttttcccctgagctatttgactaattattcttgggacaccaggcagactgcgtgatcatctatggcaggtgtgattgcaccctaggagacacagtgatgaaaacacctggtgctagaaatctgaaacaatgcctaaacagttgagtgcatccattctggagcatattaacctttccttttgggagaggccaaattaaggtctattatattacctctaaagaccataatgtgacactggagcttcaggattgaaaagtgagattgtcttaatttatagcagtgaggtgaatttggctctaacttccagatttatttatttatttattcacttatttatttatttattgacagaatcttgctctgtcacccaggctggagtgcagtagcatgatcttggctcactgcaaccatgacctcctgtgttcaaacgattttcgtgcctcagctacccaagtagctgggattacaggcatgtgccgccatgcccagctaaattttgtatttttagtagagatggggtttcaccatgttggccaggctggtctcgaactcctggcctcaagtgatccacctgcctcagcctcccaaagtgctgggattataggtgtgagccactgtgcctgacccagatgctacttttaagtttgttggatgattatgttctttaataatgttgttacacagtatgagacttttcagccctctttctagaactgtggaacaaaagccaaagtgccttcagttggtccagaaagaagcgatttgcttttatttcaattaaaaattgggagacttatctttattatgtggccctcttttacaaagaacaaattgctttgtaaactcaggtaagcactttttatctctgatctctacgttcctcatttgaaacatggtagaactggaccagctaatctctgaagtcatttctttggctctaccttgccttaattttaagcatctgtgtgattgtactgtttctttgggactctctggttcctaacccagcataacatgttcattagtataaaacatgagtttagaacttttggttcgtaacccattcttcatgttttgtcttggagagttaattcaagtgctccatccgatgtctccattaaaaaatgagaatgaaagtttttatctatttccatcctaacattgaagtgagtaatgatgatatttggttaagtataaggcactggactagggagtcaagggaccgaggttctatccctaactttttttcttttttttttttttttttgagatgaagtatcgttcttgttgcccaggctggagtacaatggcgccatcttggctcactcaacctctgcttcccaggttcaagtgatttttctgtctcagcctcccgagtagctgggattacagacgcccaccaccagacccagctaatttttgtatttttattagagacagggtttcaccatgttggccaggctggtctcgaactcctgacctcaggtgatccacctgcctcgccctttcaaagtgctaggattacaggcatgagcctccgtgcctggcctccctaactctcaagtagttgtgtgccttcctaccagtcactaatctttttgtgcttcagtgtcttagactgtaaattattgaaaagctacactttgttgaatgtccattatgtgctacatacctatgtcagtcactttatgtacatcatttgttatctgcagcagcaaagtgagaacaaatgggaacttaggccctgaaaggcaagttgtgtgcaagatcctacaggtgggaaatggcagagctaggattagaagccacatctttcactccaaagcatgttcactttctatacctatactgttattttttttttttaaagcttttttagagatgggtcttgctatgttatccaggctggattcaactcctggcctcaggccacgctccagcctcagcctctggagtagctaggactacaggcacgttgcacagcacccagatacacctatactattccacttcatttgcaacataaggatctactgtatatgctttctaggattgttgctaggaatagataggatatcaaataccacattgcttttggccattagaattttatagttagaggggacctatgagcagctctagtgtaattaagactccggattcaaatctcagctctgctacttatttagctttggacctccgatatgttacttaatctcttcatgcatctttttgtcatctattggatgggaataatagtaccaactctgtacagtgacataaggattatgcaaagcattttgaatattattttgcatatagtgagtattcagtatatattagtaaatagcagtgcagtcaggattgttttatttactccccttgttttagttatggtgaagctgaaacagtgctcaagatgaagcagctaattgaagacactgaaaagaataaagtttatgtatgtaagattatattgaatattttacaaataatcatttagtgttaaattcagcatatagtgacaacattaccctcgatccacaggttgggggatggggtaggctacagggggaagagagagctagagcctaggttaatgatttatctggcaagggttctgggcctttcatcactaacatttattggttgcctattacatagacccatcaagcctctaacttcatcttagacaactctgcagaagactgaggggacaactctttctctctgattagatcttttcaggttctgtcagatgtgtatgtattggctttttatctagttgtcttgatgaaacccaagactcagacttggagttaaatgtaacaggctgtatgctctggtttgatttgaagttcaggtatgaggggaggaatgccctgtgtgatccatcccaaatttattaaagttctctgtattgggtttggaggcctcagtcctagctaatataaaatataactttattacctggttttttgctttttgttccttttgttcatgaaactcctctggtaatatcaatatgttccctttgttcatgaaactctgttggtgattttactaggtataggatttgggtattcctcagtatcatcacaccgtgtgataacactctaatctcccagtgtttttaatgtgtacacacatacctgtcagtctaaatttcaaaaaaaacccagaaagaatgtttgacagagcatcatttttaggcagttttatagcatacagaggcagtcaatatgaagtacagatttggggagactaggttaaatgctacagaagaaagattctcatgtatgtgacattgatttttttcccccatctttataggttgctatggtgacagactatggggcctttatcaaaatcccaggctgtcggaagcaaggtaggagtttataacttgaaattcagccctctgattctactctctgctaacactccaccacctcctaattataggctgtacatttttcagacagtagtttttcattcctttgttttctttttaatgtatagatatgaatacaagatgacagttcatttttagcgggcagagaattgtggtctctgactcaggaggaagactggggtatagctaactgggtttacttctgaaaccagctcctccttagacttcacctgtgaccctaggcaaatcacttgacttctttagacacaggatttgcgggagggcaagctacctctgtctgaggctgacagtgtgagttttctagtagatagcgcatgaaatgggaatagtattgcaagtgatacaaacatatataatatatataatgttttaagtttttttcataaagaggcgtctgttgaacatttttttgagaatcctgttataaatctataatcttatttatttaccaaaactatgttaagccgaaaaggcaggttccacagaccggttgtctgcccagagtgatttggctaggtagtggcatagccaagactagaacccaatccttctgattcctagcccctggatctttctactatatcacactgctggtggatccaaagattcaacttgctaacttcttatgctaaaataaggtttaattaaagattttaacattttaaaaaaaggcaaccataagaatactagaagaaaatctagaagaatatttcactacatgaaaattaaaaacttcactgcaaaaatcattgtaatcagagttaagtttggaaaaagaatttgtagtacatatgataaagagctaatacaaagggggtattaggaaaaggtgccaaggatatgaaaaacaactcacaggataaaaaaatattacttggtactatagtaaaagatactcattctccgtatgactaaaaagtaacttagactggtagattcatataatgggatattactcaacaatacaaaggaatgagaataaaatattcatacatgcaacaacctggatcatccctctccagaaattatactgagtgaaaaaagctaatctcaaaaggttatacactttatgattccatttatataacattcttatgttttacttgagatatgattcacataccacacatttcacctgcttaaagtgtacaattcagtggtttctttggtatattcagagttttgtgaccatcaccacgatctactttgagaacattgttgtcaccccaaaaagaaaccctgtacctattagccatcactccagattctctctatgcccccagctttaggcaatcattattctactttgtctctgtatatttgcttattttgtacatttcttgtaaatggaataatgcagtatatagtcttttgtgactgacttctttcacttagcacgttttcaaggttcatctgttttataatatgtacttaattcttttttattgccattacaaatttattgcagttccatcagttgatggatatttgggttgtttccacttctttagtattatgaataatgttgctataaatatttgtgtacaactttttgtgtggatatttgctttcattgggtatatacctgtgagtggaaatactgggtcatatgataactccatgttcaactttttgagaaactgccaaactgtttttccaaagtgaccacgccattttacattcctaccagcaatgtatgagggttctattttctttacatctttgttaacacttgttattatctttctgggtatggccatcctaatggatgtgcacggacatctcattgtggtttgaatttccctaatagctaatgatgttaagtctcttttcttgggtttattggccatttgtatatcttttttggggaaatgtctattcaaatctgatatattttggctgtgtcctcacccaaatctcatcttgaattgtagttctcgtaatccccatgtgctgtggtagggaccaggtggagataattgaatcatgggggtggtttgccccatcctgttctcatcatagtaacacaagatctgatggttttataaggggcttcccttataaaaccatcattcgctgggcacttattctccttcctgctgccctgtgaagaaggatgtgtttgcttcccctttccccatggttgttaagtttcttgaggcttccccagccatgctgaactgtgagtcagttaaatctctttccttggtaaattacccagtctcgtatgtctttattagcagtgtaagaacagactaatacaaaatccttttctttttttgagacagagtcttgctctattgcccaggctagagtgcaatggtgcaatcttggctcactgcaacctctgcctcctgagttcaagtgattttcatgcctcagcttcctgagtagctgggattacaggcatgtgccaccacacccggctaatttttagtagaggcagggttttgccatgttggccagactggtcttgaactcctgtcctccagtaatctgccctcctcagcctcccagagtgctgggattaaaggtgtgagccaccacacctgccttttcccttttaaaaatagggttatttttgtttttattgttgagttaggtgtttctcatatattctggatactagtctcatatcaaatatatgatttgcaaagatttttatgtaacatacttgaaatgacaaagttatttaaatggagaacaaattatttaatggttcacaaggattaagaaggggaaggaagtagcaatatgaaggatccttgtggtgagggacctgttctgtatcttaactgtggcagtgtatacatgaatctacacatgtggtaaaattacgtggaactaaatacatacacatacagaaacacaaatgagtacaggtaaaactggggaaatctgaacaagagccagtcgattttatctgagatgtttttccctacaccaaccaattctccagttctctgattctctaacatcaactggatgtcccaacaattcaattcaattctgacactaactacctgggaattagtgtcagattccacaaacttaagggctcagtcccacatgactaccctcacttcagatgccagccccaatattgaatcctcagattacctacacttttgtctcacttggctacaatttttgggattcccagcacttccccccaaagttggtaatttgctagagtgactcacagaactcagaaaaatgctatagttactattagtttattttaaaggataaaaatgagcagtcagatgaagaagtacacagggtgagacccaaagtgttccgagtacaaagcctctgtccccatggagttggggtgtgtcaccctcttggcacatggatgtgttcaccaactctccaaactccattgcttaggggtttatatggaggatctgttatatagacatggttgattaaattattggccttcagtgatagagctcagtctccagcccctctccccttcccggaagtcagagggtagggctgaaatttcttttttttttttttgagagggaatctagctctgttgcccaggctggagtacagtggtgcaatatcagctcaccgcaacctctgccttccgggttcaagcgtttctcctgcctcagcctcctgagtagctgggactacaggtgtgcaccaccatgcctggctaatttttgtatttttggtagagacggggtttcactatgttggctaggatggtctcaaactcctttccttgtgacctgcccgtcttggcctcccaaagtgctgggattacaggtgtgagccaccatgcccagcccaggctgaaatttctaaccctatctaatcacatcgttgatttctctgtttctgaagctatctagggacccacagtagtcacctcattaagggacttaatgaataacaaaagacacttctatcactcagaatagtccaagcgttttaggaactctgccaggaactagggacaaagatcgaatatgtatttcttataccacagtatcaatgccagcatcctggttgtgttagtgtactatagttttccaaaatgtcaccattggagaaaactggataaagtgtacataaaacctctgtattctttctttcttttttttttttgagacggagtcttgctctgttgcccaggctggagtgcagtggcacaatctcggcttactgcaagctccacctcctgggttcacgccattctcctgtctcagcctcccaagtagctgggactacaggcacccgccaccatgcctggctaattttttgtatttttagtagagtcagggtttcaccgtgttagccaggatggtctcgatctcctgacctcatgatctgcctgcctcggcctcccaaagtgctgggattccaggcgtgagccaccgagcccggcctagacctctgtattatttcttttgagtgcagatgaatgtacaattatctcaaaaattttttttcacatagggcagcaaagttatcaaatatttttaaaaaatgatttaaaacactcctaaaatctttgagattaataaatattttaaaagattgctgttaatacccagtgttagaaatggatacttttactctctatcaggagcataatttcacagactttggcaatgcctattaacatcttttatgtgcttattaccctttaatccagaaattctttgaagaatttagtgtaagtagagaattacataaattatgtgcatctgttttgtagactatgcagatgattgaaagaatgactgtatttctaagacataattatgcctcatcttaccagaaagatgccatggaaggttttcatacaattccatcacactgctacctgactgataacagttgtaaaacatcattgattatgagaagcactccaatttcagagagattaaagtgagaggaaaagaaagtgcatcttagaatcaatgaaacacaataaatgtcagtttactgacatgagccaggagtggtggcatgcacctgtaattccagctacttgggaggctgaagtagtaagatcacttgaggccaagagttcggggccaggctgggcaacatagcaagaccccactgatggcgatggaggcctgtctagagtggctgctgcaaagatgccagccatagtgggggctgtgcggccagggctgcatgttctatggagctggcaggagccctgcccccttatgagttagtggggtgggagcccaccctcatgggtgcagctgccgccacccagccctggctgcagacccaggcatccctgcactcttggaggtccgggaagacccctttcccccatagtctcagaagtgcctgctcccactgcctggactctccaagctcccggctcctgctctgattttggagcaaagtcgaagctgagcctgggcactattgcaacctggctgggtttgcacaccttggggtggtgctgccatgccagcttcctaccatcttggccccctctggactttgggtgccagtgagcacaggagggaggccaaaggggtgctgagggtggctcagcatgggcctgcaggtgcccctgggcacagaacaactgggcgtcatggacaacatgattgatggtgacaagaggcagacaggctcctgggtggaaaggggcaggtctcggtgaagccgcaccttcaagccagggatggcctaaagcataggggccaggctgtcagttccaggtggagtctgtggcccagagtgagaacttaaggtgcttttcctgggcctgcccatggaccagtcagcacacacttctgaagactgtaaaaatcctggactcagccagacttgggcagacactgggaggacttgcctgtggaaatgggttacccacactgggtctcctctccgtcaagggctgcagatgttgggatgacctgcctgcagataagagctgcccattctgggtctcctctctgctaagagctgcactcaacaggttgacctgcctgtggaaaggagctacctactttgggtctcctgagagctgtaccatcactcaataaagcaactctttgccttgcttaccctccagttgtctgcttacctcattcttcctggatgcaagacaagaacttgggacccgttgaatggcgggactgaaagagctgtaacagatccaagggctccctgagccagagctgtgacacctctttggggctttatggttcctggcctctccaagcttctgggcaccaccatgttccccagagtccacagtggaagccgcttgtggtatgcctggtccatccacagcctcacatggagctggtgcctgtgccagcacctggagctgcctgcccagccacagcagccagtgtgcctggctgtgcacagtggctggaccccatgctcactcactcatgcatccctcgccactccgagcctggctcgcccttggcaggtgtgggatctgggacggcagcatgagccaagcgcagcccattagaccaagtggatggaacaggcctagtggccccaagcaaagctgaatgcagcctgccaggccaagtgggcagaacgagcccagcaggtccaagcaaaactcgggcaaaggtgctgctggccacagcagcttctggctggaaaagtgacacctgaagaatcttgtgacaccatctttacaaaaagttagctgggtgtggtggcagaaggatcacttgggcccagaagttagaggctgcagtgagctatgattgtgccaccgcaccccagcctgggtaagagtaagaccctgtcccttaaaaaaaaaaaaaaagaaaaaactaacatggaaagaagtctaagataataaaatttaaaaacatgttgcagaagactttgtatagcatctctcttccccttttaaagcaagtgtgcatatgcctttaatatcttttttctttatatagtttaaattactgcctatgtttagaagaaaggctggaggaatattcaacagattaacaatggtcacttctggggagttggttttgctaaggaagggatgtacatggaagagggactttgacttctggaaattttttttaagttttttctgttaaaaaaaaaatccaagaggtgatctttggataataaatccatgcctctaaccttgtagactactattctgcaaattgcatctttgcttaagaaatggtttaccagcagttttcaagctggcagtcagcagtctgtaattaagtttctcattttatgttgtctggaatttaatgacatcgaactcttccccaccccacaggacattcatctctttctgtctgagcacaggttttcttgttagtatagttgccatagctgccagtgcctgaaagtcccattctaatttgggcatatgtgacactttggggactgtgtgggattaaaggcctgtgaccttccagcagtcaatcttcaactcattttatccataccctgtcaggtgatgcctctgattgtggctgacagcttacaagtgaatctgtcagtctgacagctgggctgaggcaagcctcagagggagagctcagggagccaaataattaggtggaaactctgtgagttttaatcctgagatctataggtttattggataacttgagcaattgacttccttacagtgtatcttagtttctctgcccataaagagggaagattattaagtctcagcctgaaaggactgagttagaaaataactctggtctgatcaggtcttaacatctttggctcaggtaggtagattctaatttgagctggtttcccagatgtcatgttctcagaatacttcagccaacactgagttgaagaccccttcctactattcaaacctaagctagattttctttcccctctcatagtattatccaatataactttctgtgatgatgaaaatattccttatgttctctgatttgtttcctgacaccaaccaactccccaattctctggacaccaactgggtgtccagtgactcagttcaattctgacattatttatctggagcttgtgttagatctcacaaatttaagggactcagtcccacaaaatttcccccatttcagatgccagctgcaagtcctgggccacttgtacttctgaccaatcagctgtaaacaggggttccatgaccacctacttaggtttgagactttgccagaatggcttacagaagtcaggaaaacactttacagtagtccccactcatctgtgcctttactttccacggtttcagttaccctaggtcaactgaggtttgaaaatattaaagggaaaattctagaaacaattcataagctttaagttgcagttgcagtgtgatgaaatcttgtgctgtcttgccacattccatctgggacttgaatcatccctttgtccatccacactgtgtacgctacccacccattagtcccttagtagccttctcagtgatcagatcgactgctgttgcagtgcttgtgttccaagtaacccttattttacttaatggccccaaagtgtaatactaatgctggcaattttgatatgccagagagaagccataaagggcttcctttaagtcaaaaggtaaaagttctcaacttaataagggaaaaacagggacccctagaggggggactgaggaagggggagaatggttgaaaaatttaactttgagtactatgctgagtactactgtaatgggatgattaatatcccaaacctcagcatcatgcagtgtacacagataacaaacttgaacatatgtacccccggaatctaaaataaaggttaaaaacaaattaaggaaagaaaacgtaatcctgtcctgtggttgctaagatctaccctaagaatgaatcttctgtgtgtgaaattgtgaagaaggaaaaattcatactagttttgctgtcgaatttctaactgcaaaagttacagcaacagtgtgtgataactgttcttacagtatgttgttatgttattattgttaatctatttctgtgcttaatttataaattaagcttcacagccaggcatggtggctcacacatgtaatttcagcactttgggaggcgaggtaggtggatcgcttgagctcaggagtttgagaccagcctgggtaacatggtgaaaccccatctccacagaaatacaaaaatttactggtcatggtggtgtgtgcctgtagtccaagctacttgagggggctgagggggttgtttgagcctgggaggcagaggttgcagtgagccgagatcatgccactgcactccagcctgggtgacagaacaagaccctgtctcaaaaataaataaataaataaataaaaattaaactttatcttaggtgtgtatgtataggaaaaacatagtatgtataggattcagtactattctttgccagtttattataaaggatacaacttaggaacagccaaataattgaagagatacatggggtagggtatggctggagtggagtgggatcgggtaaggtgtggtggggagctttcatgctctctggtatgccaccctcccagcactaggatgtgtttgccaacccagaaactacaaatctcatgtatgggagtttttatagagctcagtctctagctcccaaccctcctctttcttcctagaagtaggagattggtgggtgggattgaaaattccagtcctctaagccagcatggtggtgagcacctgtagttccagctacttgggagactgagacagggggatcagttgagccgtccaggagtttgagtccagcctgggcaatatggcaagatcctgtctcaaaatagaaaaagttccagccctctgatcgcttggtctttctggtgactagtccatcctgaggctatctagggatcccactctgtcacctcattaaaataaactcaggtataatcaaaaggggcttactatgaataacagaatacactcctatcacttaataaatcccaggagttttagaagttctttgacaggaaaatgaacaaatgtatttttgtattatactacatctgtgctgatacatgactttttcattttatttatttcaactaattgaaattgaaacttaaaacagctacatgactagtgactatctattaggcagtgcaaccctatacaattataaagttcttttttttttcctactgtcttctgccatccagcactaaactatgaaattttgagaacagatttttcaacattatactttcagagtttcttgcttatgatagaagctcaaatatatttagcagtggattcagtttagcaaataattattgagttctattttctgattagcttttttggtgggaacacagaggtaagagaaacataatcccttgctgccctcagattgcttacagtctagtgatgtaaacaaattagagtggcgtgtaataaaaatgagtgttgttgcacttagtccatggaattgtggaacggttaggctgtttggatgagtcagggcatagtacaatacttgaggtatagtgggtgggtgttcagtaaatctcactgaatgaatgaatgaattatagcctcagttctaccattaactggcttcttggcaagtctcctagtctttgagccttaatttccttatccctgaaatgggaatgatgtgcatattttagggtcttgagtttttttgactgggaggaccatgtttcattaacgcttggatatatttttgcctataatatagtttaagcgtttagtaaatgttttagtgaatccttaatcccaacaagaataaagggtgttaaaacactttcacgaatgtgcttatattattgtcatataccattgattgggagatgaattgacttaaactgtggagagggaattaagattacccaagggtaacagtgaccttttgttttgacatttttttggctgcagctgtcctctaatgatttgagattttcacttctttcctttattgccagtggaagttgtggaagaaattaatgttgaacctaacgcagttggggtaacggttttaaggggactataatgggctcactctgttactctcatgtggtgattgaggagctagccctttccaagttgtcaggtttcgtttttttcctgtttttaccagcagacactcagatgggactaattctgtttaagtgtcatgttgggtttattgaacttgatgatggacttgatatgcctcttgggcatttatttatggcttgatgtcagaaatccatgcacaggttgctctgaagagctccctttggtgtagcgtgggaagcaaagcatttttgtttgtttgtttctgtttgattttggagcatatgctagaacagaattagatgtactttcctctatttgtaggtaagttcatctttctcctttttttaattgtaaggataatatagattaataataaaaatggggaaaatattggtatgatgtaggagacctgataaactcatatttgaattgcacttctgttatttatcagccttgtgatcctggataatttatatgatttctagatgattttttcccatgaacctttgtcaaagaggattaaatgaatggatggatgtagtatatatagtgaggtactcagcacaaagggaaggggcctcaaatattttatatggtgtcctctactgcatacacgtcatctgacttttggtggtgtgtccatgttaacaatgaagtctctcccaagaattcagactgctttctgagaatgaatctagtcatgaatccctcccatacagagtatagtttcagccatagatagaaataaaccaggtaattgcctataaaacagactgaagagatgggagcactcaagatgcaaacaagataatctgggtgtaattccagggaaaagggattggaatgaaattgtaatttaggagactgaaatctagttgattgtatcataatattcttttttttttttctcttgagacggagtcttgctctgtcgccctggctggagtgcatttgcatgattatcagctcactgcaacctccatctccggttcaagtgattcctgtgcctcagcctccctagtagttgggactacaggcaagtgccaccatgcctggctaatttttgtattttttttttagtagagacggggtttcaccatgttggtcaggctggtctagaactcctgacttcaagtgatccgcccacctcagcctcccaaagtgctgggattacaggcgtgagccagcgtgcccgtcctgtatcataatattctaccgagggagagattatgggaacaagcagggggttgtcagcttaaaacatggtaaacatagtaaaagacaggctgagtgcttgaagttggcagagtttatcttgccttatttatggcagaaatgaatctaatgataggaactgtagagatggattttttttttttctttgagatggagtctcgctctgttgccgggctggaatgcaatggctcgatctcgggtcactgcaacctctgcctcccaggttcaggcaattctcctgccttagcctcccgaatagctgggactacaggtgtgcgccaccatgcccaactaatttttgtatttttagtagagatggggtttcaccatgttgggcaggatgctctcgatctcttgacctcctgatccgcctgcctcagcctcccaaagtgctgggattacaagcgtaagccaccatgcccggccgagatggatttttttatgaggaagtgatagtacactaaaccttcatggacaaaaaaagtatctcaaaatagttgtctcccttttgttctgattccatgtggaagcaatttctgatcactaatgatcactaatgtaattgttcaggtatttaatctgaaggcagcagctagtttacctagatgaggactgagaaccttccaggtataaggaaagtatatcttgtattgtaaattaataaactggtgtgtgtctctctctgaaccagtcactaaactgacagtctggttaatgtattttagtatataagcatctgcatgctaaagactcctgcacttatatctacagttcatacccttcccctgagctacagacttggatatgcaactgcctacctgacatttgcattcaagatcgagggcgagggctagactgtgtcttttgtttaattcactgcataagctaaggccttttggtaataagccattaatgtctcaactttaataatcctgtaccccgttataactatttttatgtttccttttggtctatgtccatatgaggcatagtttcacattatttcatagtgtatatattatttaattataaaaatatataaatttttatgattggaaataatgcatgctcatcatagaaaaatagagggaaaaacacacaatggaaaatgatcattatgtgctattactaccatacagagataggcactgttaacattttggtgtatttcttttttttttgagatggagtcttgctttgtcaccaggctggagtgtagtggcatgatcctgggttcaggcaattctcctgccttagcttcccaagtagctgagactacaggtgcctgccaccacacctggctaatttttgtatttttagtagagatggagtttcaccatgttggccaggctggtcttgaactcctgacctcaagtgatccacccggctcagcctccgaaggtgctgggatcacaagcatgagccaccgcgcttggccaacattttggtgtatttctgtatattcacatatgtgtacacaatttaatatgttgagattaagattatactgtatatttaaaatgtgtagttttttgcacgtaatggaccttaaacatttccccattaaaaaaatattttctataaacatttaatggctttattctgtcattcagatgtaccacataatcattttaagttgtttccagtttttcactgctaacgcttctagactggtcatgtttatccaggagagagctacctgtaccaaaaataaaataaaataagtacaataaaataataaaatagaatttaaaaaaatgccgggtgcagtggctcacacctgtaatcccagcactttgggaggccagggcgggtggatcaagagatcaggagttcaagaccagcctggccaacatagtgaaaccctgtctctactaaaaatacaaaaaattagccgggcgtggtggcaggcacctgtaatcgcagctactcgggaggctgaggcaggagaatcacttgaacccaggaggtggaggttgcagtgagcagagattgtgccactgcactccagcctgggtgacagagtgagactccatctcaaaaaaataaaaaataaaatacatatgtgtgtgtgtatgtgtgtgtatatatatagtttactctcactgactcttagatatactctaaagacccatggaaattcagttgtagcataaaataaatacatttatagcgtaaaagagcaaaatatttcaaattaacttgcttaagctacttaaagacaaaaaaagttcatttgaaatcttttgtcattttttcactggttatatggaatcaggtgagagaaggacaagttttgatgccattatttctatgtggtactccagtaaatagactttctgttttagggaagaagaatagtgttccctcaagtatattaggttcaacattaatttccatcataactttcattagcaatagaggaaagagatgaattttaaccagtagaggacagttgcagccaaaaacaagtcaagatgaagggcttcccctttatgggatctgaatttcctcttcaaactttaaaattaggctagttggctcattacatcataggggaaaaaaataaaccccatttgcatgaatttcaccaaatttggagattgtgtgttgatctaaaattaaaaacataatgtatataaaacattttagaggccccagagttgtttagataggtaggctatcaacctccagaatcagcttatgtaggtatgtgggatgtagtgatgatggatagagaaagtagtggctcccagtaggagctctaaacagaaagggcaggtattttgagtttcaggcatctgcaggcatccatgtgcatctctctctctctctctctctctctctctctctctgtgtgtgtgtgtgtgtgtgtgtgtgtgtgtgtgtgtgtgtgtgtgtgtgtgaaagagagagtgggagaatgagaatagaggtggataaatttcccaagcaacttcagggagggcagttattttagacaggatgactgatttttattcattcagagtaattatttatgttcattttctccagaattgaagtaatcctctattattatttattatcgaaaataaatgaaaaggttaacttgtaatactataaccactgttggcatttcaagtcatttctttctaatttttaaaatgtttttaaagcatttgtaatcatactgtataattttgcattatgcttttgttatttagtatgggaaaatgctagatacctacagtacttgatacataataggcactcaataactatttactaaagaaggaattattgacttgtttaaaaatcttttgaatggaccatcaagcgactataccataattgacctaattgttatcctttgttgtttctaaattttcctgtcttaaaaatacattgaatattttgatgtaaatcacttttcctgaagcatatagtttttcctatgtataaagttattttcttaggacaggttcccagaagcaattaggggtcaaataaagtattagaactcttggttgcaaggggcagaaacttaattgggaaacattttggccaatcttgtcaggggcttccaggataactctcagttatgtttctcagttatgtttctgccccttgtctctttcctctattgctgggacttcagcctttgctgtattgggtgctcagtttatactcccagggctttgcttcttgtttaccagtgctcttctttgcttttctctggcagactcttgccatctggtggtaaagattggctttggcaattttttgtagtttacaatcctgatttgtatatgtaaaatgtaataagcaaggtggttctcccaaggaaaggattttggacagacaggaaaaggatgtttgctataagtgttttattaaatgttattaaaatattatttgatttatttttgagacaaagtctcgctctgtcacctaggctggagtgcagtggtgccatcacagcttactgtagccttgacttcctgggctcaagccatcctcccacctcagcctcctgagtatctaggactacaagcatgcaccaccacatcctattaatttttctgtaatttttctagagatggggtctcactgtattgcccaggctagtcttgaatacctgggctcaagcagtcctcccaaagtgctgggattacaggcctgagcttccatgcccagcaattatttcattttaaattatttttattaaatgtgtaatagtttattagtattttatcattcttgatagccattgatagtgacttccaaaagtttattctagccttagtaatagttcttattttactatcctttcaccacattgaatattattttctaaatactttgctaatttaatggattaaaaatagtagcttgtttatatttccttttttaacttaacgtctatcataaatattttttgtaattaatttaaatggctgtttacttttttattccacagatttactatgtttgccatgctgttttccagttattgttcattagggttgttttatggttcttatatattttttaacctctgtaggtaataataccgcaagttatttatgtatttatgtatgtatgtatgtatttatttatttgtgagatgggggtcttgctctgtcacccaggctggagtgcagtggcgcaatctcagctcactccaacctctgcctcctgggctcaagcagtgctcccacctcagcctcttgagtagctgggatcacaggtttgcaccaccacgcccaggtaatttttgtatttttggtagagatggggttttatcatgttgcccaggctagactgcaagttatttcagctctgtaagttttttggctcttgtgagtttttcctttgaaaaaattctattgatgatattcttgcatcaaagataaacatctttatctttttgctttcaaataattttaccaacttatatttctatcagtattgtgtaactacagatattttatcacatctttactaatatggagcattacattttttaaattttttgttttttatttttaaaataagatttacaatatttaaaaaatagagatggggtctcgttatgttgaccaggctggtctcaaactccttgcctcaaggtattctcccatcttggccttgcaaagtgttgggattacaggcgtgagccactgtgcctggcctattttatttacttatttttttgaaccaaggtctcactctgtcacctgggctggagtgcagtggtgcagttgcagctcactgcagtttcagcctcctgggctcatgcgatcctcccatctcagcctcctaagtagctagagctacagacacgtgccaccatgcctggccaggtttttttttttttgtattttttgtagagactgggttttggcatgtttcccaggctggtcttgaactcctgagctcaggcaatctgcccgcctcagccttccaaagttctgggattacaggcatgagccactgtgcccggccactttgagcattattttaagaatgtttgttggttgattgggtataaaaagcagtctcaatttgcagttttaagtttcacgcttttcagtaaaaattttcatttttcccttgcattccccaactcttaccttcttatccagtttagagtataaataccagatatgccctctgctttacgttatttcttcttcttgtgcccaggtctggtccatcgaactcatatgtcatcctgtcgggtggataagccctctgagatagtagatgttggagataaagtgtgggtgaagcttattggccgagaggtaaagttctgtgcggctcccttgtggttagaaaggattaggaagagctgggatttttgatattttatgatagtgagtgtgtaaattttgttaattgtgctgataatcttatttttaaatcctgccattagaatctattctgaattcaaaccttctggtagactgtcctgcaaactcagaaggaatgatatgagctataaaagtgtggtgcaataagtgcacgtttgtaaaacttccctccctgaagtttacccatagggtgggccggaggagagaaaaaagaaccaaaaagagagaaggaaagttgacctatgggacaagtgtttatcacagacttcaaagaatacctgccagatacacttcagtttgggacaaaacaaaaagaacacagatagtttacagtcattttccctaatatctggcaccatgcaatgtgcagaaagtgaaaaaaatctgaaggaccctgttactcacttgagggtatgagggctgtgggtgtgggccgaccacaggagaaataagagcatacactgagtcctgttctaccagagacagcacaggagataggcatgaaagaactattattcaacaatatttaagtgcttaatatgtgctaggtttgggagatataagagcgaaccagacaaaaatgatcccagctattatggagttaatatagaatataagtagagacaatttttctttcttttttgagacagggtctctctttgtcacccaggctggagtacagtggtgccatcacggctcactgcaacctcagcctcctgggctcaactgatcttgccacctcagcctcctgagtatctgggactacaggcacgcaccactaaacctggccttttttttttttttttttttaatttttttgtcaagatggggtctcactgtgttactacccaggctggttcaaactcctgggctcaagtgatcctcctgcctttgcctccccaagtgctggaattacaggcatgaatttccatgcctgaccaagacaaatatacataaaataattgcaagttatattaagtgctatattgggttcaaacactattggaagaagatttctagttgtcaggaaaggactctttgaggagatagaatatgagctgagaccttaaagaaaaggaactagtcatggaagacttgggataggaacattccaggcagagagaataactgatgcaaagaccctgaagtgaagaagtgcttcatgtgctgcgggaagcaaaagaagaccaatgtgacaaatgtcttcatgcttaaagaagctctagaccaagtccagaaggagatctagtctcttgaagtattcaaaaacctattctggacttagggatatctcaacaaatcactatgctgaacttacctggaagaaaaacttttattttctgcctggttacttccacaagccatggattttttgagctaccatttttgtctttccctcagagggacaagaatgagattaagactgtttcctaaaattcttctgccacagggtctacctgttatgcttatttgtatctgcaatgttcctagcacagtacctggtccattaaagaagctcaatgttatgatgaaaacgttgactcttaattttagactggccatctaaatgatgtatttaaagtttttggtgactttttttggtctctttcagatgaaaaatgatagaataaaagtatccctctccatgaaggttgtcaatcaagggactgggaaagaccttgatcccaacaatgttatcattgagtaagtaaaaggtttggaaaggtgaaaattcttctgcctcccaaatcataaaatggtttagtaaatcagactgaactggtaactctaccatttatggactttgtgatattgataagttacgtaacctttgcaatctttggtttttagaaatgtaaaatgaagttagaccaggcgtggtggctcacgcctgtaatcccaacactttgggaagccgaggtgggcggatcacctaagaggtcaggagtttgagaccagcctggccaacatggcgaaaccccgtctctactaaaaatacaaaactagaaatttgctggatgtggtagtgcgtgcctctagtcccagctactcgggagactgagtcatgcactagagtctcttgaacccaggaggcagaggttgcagtgagctgagatcatgccactgcactccagcctggatgacagagtgagactcggtctcaaaaaataaaataaagtaataaaataaaaatagttaacaccttgctgcatagagttctaagatgaaacgttaacgtaccaagctcctggcattggagtgctccatcaatggttttgtttcctttcccttaatctctttctgtttctgccctttaacgagttagctaataagcattcatgaagaactattctttacctctctcccagtgatttctgcaggtggggttacgtgggtctcttccacatagagaccacgtggaagggtagagtaatccaggaacaactccagcggggtttagactcccacatcttgggatacactgtgctctgaaaacaacatcttactttcgttggctcttctgacctttcatttaggaatgggaaattatctatgtaggacaatgtctggcaatacaaggaatgttctgtctgtctcaagtctttcttggatttcttttttttttttttttttttttttgagatggggtcgcccaggttggagtgcagtgccataatcacggcttactgcagtcttgacctcccaagcccaagctatcctcccacctcagcctaccgagtagctgggactacaggcatgcgccaccacacctaatttttattttgtagagacagggtctccctatgttgcccaggttgttcttggacacctaggctcaagcgatcctcccaccttggtctcctaagtgctgggattacaattgttagccaccatgcccaggcttctttcttaaatttctcatcggaggttcttggatccctaaagtctcttaaagggggatcttggagggttttttttttttttttttttgagacaagtttcactcttgttgcccaggccggagtgcaatggcacaatctcggctcaccgcaacctccgcctcccaggttcaagtgattctcctgcctcagcctccacagtagctgggattacaggcatgtgccaccatgcccggctaattttgtatttttagtagagatggggtttctctatgttggtcgggctggtcttgaactcccgacctcaggtgatctgcccgtctcggcctcccaaagtgctgggattacaggcgcgagccaccgcgcccggcccttggagggtttattaactgtttttagtgttttagaaagccatccaaaattctatgtgtgtcctcaggttaaccatgctgttattttgttgcttttgatgataaaatatcacattgtttgtcttatgttaattaggtacgctcaatgacaattatgtcattgatgaatttaaaagacaagaaaaatgatagaatgttatttgagtgggatcttattggtgaaaagtttggaaagccttatgtttatagttctgagcaaaatcactttgaatttgaaggaattttatctggaagtaagggaaatgttattgaatacatactgcagtgccaggcattttatgtacattcttgggtacataacaacctgcaaagtggatgttatctccattttaccttatattcctactttatagcttggtgcctggtgataagtaacttacctgtggttacatagaaaattatcagggactcaaaactcagtctctctgaccttaaagctaatgcccttttcaccacaaaatgcttctcactcttgcatgtgacttacagaacttttcatatttctgtggtttagtctctaaatattaacatgtttgtaaggctgattattgacaaaatactgtcagtaatagtaggaatcttttataactcagagtgcagaagtgtttaaatctggctgtggttcaagttagtgttgggaaaaggaaaaagaaaaaattctgatgattgcattgtaataaatagcttctgctccaaaaaatccaatgctatatggactcattaaaaaatagtgaaatttcccaaagccacccttacagtgataaaatataaaacatgtaagataaaagagctaaccctgtttctcagaaaatgggtagggaagggaaagggctccctggttttgggctgtctctgtgtagaactatttttagtaataatcaagtggctgaaacagtaacttttgttgtaaattatgtctatagctgcatccaggaaggaagcatggcataatggaatgattagaggatttagagctagacttgaatcagaaagagtactggttctgctccaaactaatatatgactttgagcagattaattagtctatctgaatcttagcttctttactataaaaggagacagtaacatatatctaaggaatgcttgagtgatttaagtaaaatcttatttgtaaggagccagcttcatgtctagtctatggtagacatacatgtagctacttgtagttattgttttaaatgccgctttgttttatcctctaatatctgagattatagcaccttttcttttttcctcatactatggtgtacggaaccacacctttgcttttgaaagagtgtgtgtgtaagacccacaaaaacagagaccatgacttgtctgccattgtgcctgatgtatagcatccatagtattcatttagtttttttgagatggagtctcactctgttacccaggctggagtgtagtggtacaatcgtggctcactgcaactctgcctcctgggttcaagcaattctcattcctcagcctcccgagtagctgggattacaggcatagtccaccatgcctggctaatttttgtatttttagtagagacggggtttcaccatgttgaccaggcaggtgtcaaactcctgacctcaagtgatcccccgcctcagcctcccaaagtgctgggattacaggcatgagccactaccgctcagccctagttagtactttcatttactcatttgttcaacaaatataaggcaacttgtaataaatactaaaagagtagtttaaagcagttgtccccgacctttttgtcaccaaggactacttttgtggaagaccaatttttccatggatagggggctggaatggttttgggatgaaaccgttccaccttagatcatcaggcattaaattctcatagggggtgcgcaacctagatccctcacatgtgcaggtcacaatagggtttgcactcctatgagaatctaatgctgctgctgatctgataggaggcggagctcaggtggtaatgctccttcacctgctgctcacctcctgctatgcagcttggttcctaacaggccatggaccagtagcagtctgtggcctgggggttagggactccctgtttaaagaaagggttctaggaattcacttgaggaggaatagtttacttcaggccttgatggtcagagaataggtggtatttgagttaggttttgaagaacagataagatcttgtcagacagcaggggaaggaatggtatttcaggcaaaagaaatggtttgaggaaaggaatgaggcagaaaagcacatagtacatttgggaaccttgtttaaggaaagaagaggatatggtcaagtactagaatggaaggcttgaaagataatttagggtcagattgtggagagccatgaatatcagttaaagaatatgaatttttatttatttattttttgagatggactcttgctctgttacccaggctggagtacagtggcatgatctctgcctcccaggttcaagcaattctcctgcctcagcctcctgagtagctgggattacaggtgcccaccactgcgcccggctaatttttgtatttttagtagagacggggtttcaccatgttggccaggctggtcttgaactcctggcctcaagtaatccgcctgccttggcctcccaaagtgctgggattacaggcgtgagccatcacacccagcccatgaatttttttaaaaaagcctttggacagagaggcttctcgtcagattaacctccccaggaatcccattgtctggccttgccctgttatgctcagtattctcatcctgtcttcagccatccatagtttgttagccacctttcattttccataaaaatctaactcttatattcatcccctcaggtcccaaagtgttaatgagataatctaataagtgactctgtaaatggaaaggggctaaaagcagtttccaattaggcatagcctgcaaagtacagtctttttcttttttattatgatcaagatcagaattgagtgtagtatataattttttttttttttttttgagacagggtctttgtctcccaggctggagtgtagtgatcatagctcactacaacctcaaattcctaggctcaagtgatcctcctccttcagcctcccaagtagccaagactataggtccatgccagcatgccccactaatttttttttttttttttttttttttgagacaagagtttcactcttgttgcccaggctggaggcagtggcacgatctcggctcactgcaacctccacctcctgggttcaagcaattctcctgcctcagcctcccgagtagctgggattacaggcatgtaccactatgctcggctaatttttgtttttttagtagagacggggtttctccatgttggtcaggttggtcttgaactcctaacttcgggtgatcttcctgtctcggcctcccaaagtgctaggattacagatgtgagccaccatgcctggcctaatttttaaattttttgtagagatgacgtcttgctgtgttgcccaggctgatcttgaactcctggtctcaagtgatactcccaccttggccttccaaagtgctgagagattataggtgtgagccacaactgctggtccatagggtagtctttagaaaaagcacatatgacttaactctgttaaaatttttcatttgtatgtctccctccattgccagactattagttctttccagaaaagaatcatgttttgttcgttttggtatacataattattactatcactagtattagcactggcgttatccacttactagctgtactgaaaaaatgagattaatctcagaatctgtgctgggatggattggaggaagaaaactggaggcagggagaccagtgagggagttattactctagatgaaacatgatgggagcctaaactagaatgatggcaatgaggacaaaaagagagacgtgggtgactgacacatttgttgaattgagtgttaagtgggaagtatgatttggtttgtagtctggtagaagccacagagtattggaattgattgtcatgggggttgcttaagctgcaactcacagccacttgaaactcatctctacaaatagataggtgaaagcaaaaaccatgtttgtgagttccttgagttatgtcctcaagtttctgcctttgttatgggtttttttttgttgtttgtttgttttggagacagggtcttgctctgtcacccaggctggagtacagtggtgcagtccgctcactgcaacctcaatcttgcaggcttaagtgatcctcctgcctcagcctctcgagttgctgggactacaaacacaagccaccatgcctggctattttttttttttttttaagtaaaaggaatctgtactgttagaaattagaattgtgattacccttgggggaggcaggtaactagaagggagcatgagatgggcttctgagatgctggcaatgttctgtttgtttgtttgtttgtttgttttgagacagagtctcgctctgtcgcccaggctggagtgcagtggcgcaatctcggctcactgcaagctctgcttcccaggttcatgccattctcctgcctcagcctcccaagttgctgggactacaggcgcccgccacctcgcccggctaattttttgtatttttagtagagacagggtttcaccttgttagccaggatggtctcgatctcctgaccttatgatccacccgccttggcctcccaaagtgctgggattacaggcataagccaccacacccagccttaatgttctgttttttgatctgagtactggttactttggtatgttcaaattatgaaaaatcaagtgagctgtatacttatgacagacatttatatatatatatataatataatatatatatatatattagttctcacactgctataagaactacctgagactgggtaatttataaagaaaagaggtttaattgacttatagttccactgcctgtataggaggcatggctggggaggcctcaggaaacttacagtcatggctgaagggtgaaggggaagcaagcatatcttcatatggcggcaggagagaaagagagagagagcaaaggggaaagtgccacacacttttaaaccatcagatctcatgagaactccctcactatcacatgggggaaatccgaccccattatccaatcacctcccacaaggtccctcccccaacactgggaattacaatgtaacatgagatttttgtgtgtgggggaacacagagccaaatcacatcaacatatatattatattttggtaagaagtctaaaaatgttttaaaaggctatgagaaatgcaacaaagagattaattctgtctgaggggctcagaggaaaagacttgatagaaggagagctagtaactgaactgagccatgaaatgtctaggtatagtgaagtggtgaggtgagagtcaagtggggaaacagagcatttcagagagggggagaactgcctgagcaaaagcactgagccacatggataagagaaaatagacttctttggccagagcatattgtgtgagtaaagatgaggctggaaaagtagtttagagacaaactgtgaaagaccttgaatgccaaggtaaagaatttggagctgattttctagaaagcctttgaaggtcttttaaacctatgagtgacctggtaagggttgtagggtgtttagcatgttgagtaattatatattttcatcctctgtgcattagtgagatgaaggttagtctcattcgtaattgttaatttagggctatttcacatcattgcatttactgcctgtctcgttctgtcaaaaactttctttctttctcccctttccctgccaaaaacaaaaaaccaacatacaaccttaccttgtagtatctctggccatatctcttaagggggccggcagtcggtatctttttcattataggcaagaagagaggcggaggcgatccttccaggattacactgggcagaagatcacccttgaggctgtcttgaacactacctgcaagaagtgtggctgtaaaggtagggtgaagcctctgccctttccacgtttctctccttgtggatggacccttttctggaagaaggaggcagcccagtgtgagtttagtttaccctgttttttagccaagtgatggcctttgctgttttttccaccagactcacatcagagttcatggggtgatacattttctgttttcttttctgagtgctggccctaccagatactataccactaccaccactcctcccaccccacccacagcatatgccttgtctgggcaagacccccatgaactatgccaggaggagtaagagtgttggattatgattaacactctaattttatctccaaggatgatgattctgcaaaaattaagcaacttagacatatataacttaaagatccaagtcagactctcatctttatctctttaatgtcagagttctgaatacaatatctttttacaggatattgaataaagaatacaggatagtcacttctttttagctctatttcctcaggtttcctctactcttactcaaattttaaaaggtctttcagcctgatccctagttggagctataatgagagagattgccagcttctcattttcaggttgacctcaattgtcaccccttctccctagtcttccgtctaccctactgtgtgatttttctacaataactggtagcagatttgtgccctggttgaagttgtggggttttaagcccctatttatcattagcatagaggggagaaggaaaaaataaaattgagagaaagaatacctcctcaggaaaactgtgggaacattccaggtatttggaaaactctgctatatttccctgccaggtgccacccagctgttggacccagaggtacagagtactttacagatagctttttttgttgtttttaaggtagggtcacccaggctggagtgtagtgttatgatcatggctcactgcatctttgacctcctgggctcaagcaatcctacctcagcctcctgagtagctgggaccacaggtgtgtaccaccatgtccagctaatttttaaaaattttttgtagagacggggtttccctgtgttgcccaggctggtctccctgggctccagtgatcctcctgcctcagcctcccaaagtactgagattataggcataagccactgtgcccagcccacacatagctttttgattatctcatacaattcctctgtgcccctaagacaggatctaccacaaactcagacacaactagcagtgtagagcatagcatctgttaaagggcccctcagtaccactataggctcagtgaaggtgggggtcttttaaccttaaccgtgtccaacaggcattacataaagaagagaagaataatgagaggtggaatttgtcccagttagtaaaggtcaggtcaaaggtagttggttttggtgcagcagaaagcacagggcagggaggcatgagacccaggataagtttgaactctgcttctgtctatatgaccttgagctacttctcaaatctgggctttcatcttctacaaatgtaggatggatttaatgatttccaaggtgcttgccagacctgacagtctgtaaatgttcagtgcccctaggtgactgtgcctatttctctgtgtgttagcttagatgtgagtgcccacttgctaccagctacctacaagctatattcctttagggcttggcctgccactcagctccttctgctaaacatcctgctctctggagcagtctttgattgtcaggaatatgttccaaaatagatcttaaaaaattaataagccccattgttaatggagggcagtaaaaacctgcatcctcatatcctttgccatttcgagaacagtaccagtgttccccacagccctgagaccagctgctagtctggctgtggttgagtgagcagtgtcatgttgaggtggtagaaaatctaccctgaatcaaacagctgctttgaatgaactcaacaatatttcctgagccagctagcccatttcaggagacttggggaaagattcacttgctgagaagagagactacttcctttttctataccttttctacttttcttctgcaggccactttgcaaaagattgtttcatgcaaccaggtgggactaaatactctctgatacctgatgaggaagaggaaaaggaagaggcaaagtcagcagagtttgagaagcctgaccctacaaggaatccttctagaaaaagaaagaaggtgaatgctactttgcttttattttatcatgtctttttcaagttttaagatgaaaatctgaaaagcctcatgcagcagtacacacctgtagtcccagctacttgggaggataaggtgggaggattgctcgaggccagaagtttaaggctgcggtgcgctatgattatgcctgtgaatagccactgcattccactctgaacaacatagtgagacccaatctctaaaaagaaattttttttgttaaaaaaaaaagaaaaatgaaaatgtgctttttgcagaaattttagaaatactgaaaaacataatgaagcaaaccaagatcttctgtaacctttctacccaaagagactcttattggcattttgtggtatattctaatcttttttctttttttgagacagggtctcttgcagtggtatgatcttggctcagtgtaacctctgcctcccaggttcaagcgattctcatgcctcagccaactgagtagctggaactacaggcatgcgccaccatgcccggctaatttttgtatttttagtagagatggggggttttgccttgtgggccaggctgatctcaaactcctggcctcaagtgatctacccacctcggcctctgaaagtgctgggattacaggcatgagccacgacacccgtccacttttttctaggtaataataaatacagatatatatagctacacatacatgtaaatacaaaattgtggtcatactagctatagtttatacctttttttcatttcacttatcaaaagcatttcctagtatccttaagtgttcaaaaacttgatttaagagcaacataatattctaccctatggctgtatgatgatatatttaattatttttgtattactggatattttttattacttccaacctaaatttttggccacatctcttattgttttcttggataaattcctaagtaagattactgagttagggctttaacgctcttgatacattttatcaaattgccttccagaaaatacttatctgtccctagcagtgtatcagagcacctgtctcactgaattccatctcctatatctactatttatggcagagcaattcataaaacagatattattgtggtccagaaagaaacagtgcatttgtagcatgctacacagacaataaaaactattctgtaggttgatcaggaaatatttcttctatcgtgtaggatttttctaactatggccagtatattgacttttgtttcgtttttaaatctttggcaaacttttgttgaggggtcattttgtaccaggcattgtaactctaggaatacaaaaactgatgaggtccttgccctcagtggttattatctatagattaagtattatcttaattttctgggtgaggaaaagttctctataccattacaagaattagccaagtatatgaataataatttcccaatctatatattctctttctcggtgatcctatccctcctgagactttagctgcattattgacttccacattcttaactaggatgccatgggtacctcaaactttggctggagtcagtcaaatccagacttgaggctcttctgtgctatttactagctgttaatttggggctttatttttgattttctttttgttttttgagatggagtgtcattctgtctcccaagctggagtgcagtggtgtgatctcggctcattgcagcttccgcctcccaggttccagcaattctcctgcctcagcctcctgagtagctgggactacaggcgcaagccaccatgcccggctaatttttgtatttttttagtagagacagggtttcaccatgttggccagggtggtctcaaactcctgacctcaagtgatccgcctgccttcgcctcccaaagtgttgggattacaggcgtgagcctccgcgcctggcaaacttccgttttttcattttcgaagtgggattgttgtgatctttgatgacaatgttcttgcagagggatgcctgactcccaaaaataagatataaagcactgacaagtaagttcctaattagagttggctgttatgacagccctaattatcttttttagtcctccttcctaaacatacacacacacactaccaccatcaccagtaccaccaaaacccttgtttctacctttctatcatatattattacctattaatgtcagcaatactctcccagtctcccaagaaagaaaccaatgtcatttattttcctctccttttccatcccacatctagtcagtcaccaagtcctggcagtggtgccttttaagtgcatatctcaaaattgtttatcccattcccattcccactgctactgtacagtttatcccctcacttctcttacagtcagactattgaacgctgtggcctagggagttttaaaaaatacatatttgccctctacctcttaggtaccatgtttacagggcctaggtctgggcattttttttttttttaaagcaccttttttggctgggcatggtggctcatgcctgtaatcccagctgaggctggaggatagcccaagtccaggagtttgagaccaacctaagcaacatagggagaccctgtctctataaaacatagagaaaattagctgggcatggtggggcacggactgtggtctcagctactcaggaggctgaggtgggaggatctcttgggcccaggggtcaaggcagcagtgagctgtgattatgccactgcgctcctgtccgggcaacagagcgagaccctgcctcaaaacaacaacaacaaaaccacctactttatgtcactgcccacttctgttcattgttgatttctcaccctatgctttaactctgaatgttggagtgttccaagggaatctcatcctgtcctatggttttaaatatcatccctatactcataacccccaaattaagtgcttgtgtctgtattttatccaaatctgcattgctattcttgactttttctctggaactccaaatttagttaatagactgcctacttgacgtctacatctggttgtctagttagcatcaagtttaacatacctccaaaacttaattttcctagccaaagctgttctttccacatttggccctgtctcagtgattggaactcattgacccatttgataagccaaaatctgcagcctttttgtatagtgttttttgtttgtttttatggtaaaatacacataacataaaatttaccattatagaagtgtactgttcattggcattaaatacattcatattgttgtacaaccatcactgtctttgatctcgagaactctctatactcattaaacaataacgccccccattcacccttcctccctgcacttgcaaccactgttctactttctgtcttgaaaccatgtggtatttgtttttgtgactggcttatttcacttagcataatgtccttaaagttcatctgcatcatagcatatgttagaattttcttcctttttaagcccaaataatattctgttctatgtatttattttttgaagcagggtcttgtgctgttgcccgggctggagtgcagtggcacaattatgtctcactgcagcctcaacctcctgggctcaagtgatccaggagtgtgccaccacacccagctaatttagtttttgtagagatggagtcctgctatgttgctcaggctgatcttgaactcctggcctcaagcagtcttcccaccttggcctcctaaagtgctgggattacaggcatgagccaccacatcgagccccattttatgtatataccacattttgcttatccatttatttttggtgaacacttgggctgcttccatattctggctattgtaaataatgctgctgtgaacatggatgtataaatatctctgagaccccactcttctttctttttggtatatacctaatagtagaattgctggatcatatattctgtttttaatattttgaggaagcactctgtttcccattgtacgttcccatcaataatgcacaagggttcaagtgtcactacatccttgccaacacttattttctgggttttgtgttttttggagagtagccatcctaatgcgtgtaaagtgacatctcattgtggttttgatttgcatttccctaatgattagtgatattgaatatcttttcatgtgcttattggccatatgtatattttctttggagaaatggctatttaagttctttgcctattttgcataagcttgtttattttgttgttgttgttgatatgtaggaattttttatatgttctggatatcaatcccatcagatatatggtttgcaaatactttcttctaatctgtggattgtttttttactctgttgatagtgtcccttttttccctatcagatttagactttttaaaatagtggtaaagaacatataacatttaccatcttaactatttttaagtgtacagttcagtaatgttgagtatgttcatgatagtattcattgcacaaaaaaattttaatcttggttaagttaaacttacctttttttctcttattgctgatgcttttaatgtcatactcaagaaatcattgccaaatccaatgtcatgaagcttttcccttatatttttctaagagttttgtagctttagctcttacgtttaggtctttgatccattttgagtttatttttgtatatggtgtacagaaagggtccaaaatttctttgcatgtagatctctagtttttaaaacaccataggttgaaaagactgtccttttccccactgaatggtcttggcccctgttgaaaatcatttgaccaaataagtgaggatttattctatcactggtctatatgtctttatgtcagtaccacactgttttgactactgtagctttttagtaagctttgaagttgggaattgtggatcctccagctttgttctttttcaagattgtttgggctatttggggtcctttgaaagatttcatatgaattttaagatagatttttatatttttgcaaattctgatagagattgcatttaatctgtagattgctttggatagtatggacatttcaactgtattaaatcttccaatccatgaaaattggatatctatttgtatcttctttaatttcagcaacattttgtaattttctgtatacatgtctttcatctccttggttaagtttcttcctaagtatttttttctttttgatgctactgtgtgaattgttttcttaattttttttctgattgctccttgctactgtatagaaacacaactgattttagcatgttcgttttgtattctgcaactttgctaaattcacttactcgttctaacaggatttttttgtggactctttagggttttctacatagaagatcatgccatctgtaaacagaaataattttcttgcagatttagttttttttttcttttgaggcagagtcttgctgtatcacccaggctggagtacagtcacatgatcgtggctcactgctgccttgacgtcctgggctcaagccagatctagatttttaactgtgattctatttgtatgttccaagcattattctttctcttttaaccttttagaggtaaatggtacttgttacattcctaaagagggtatatggatatctcacttctgtggatctttggttgagttctttttgctgaatatattgagtataatttgttattcctttgtttctaaagctgctttgagatatgtatttcagttcacaaaaccaattactgaggctctatctgctaggtatgaggctctttatgacctgcttagtcaacctactacccagccctccattgcctttcacttagtagaggaatggtctgatgaacaatggcagtaataatcattatacattattatttcttaaaagtatctttggccgggcacggtggctcatgcctgtaatcccagcactttgggaggccaaggcgggtggatcacttgagatcaggagtttgagaccagcctggccaacgtggcaaaaccccgtctctactaaaaatacagaaattagccaggcgtggtggcgagggcctgtaatcctagctacttgggaggctgaggcaggagaattgcttgaacccaggaggcggagggtgcagtgagccgagattgcgccactgcactccagcctgggcgacagagtgagactccatctcaattaaaaaaaaaaaaaaaaaaaaagtatctttgtgtatatgaacttctaactcatgagtcctctttgattaaaaagtgttctagggagtgtagaagggtaaaactttcctcttgatgcccactatttctaccaagatagcatttagcatcgttgtcttttcacctcattgttaatcccgtcattaccttttatgcctcatatttgtttagtgcttacagtttataaaatacattgctgtttttgtttctttttatcattatacaattctatgagatagccagaacaggaattattatcccaccattttacacatgagtaaaatggagcttcagagaaattgacgtaactcaccggaagtcacacaaatataagagataatgctgaaaaaataacccatgtcttcagattactaacaatattcttttctgtatatcacacttcaaccatttatttaactcttcaattattcatttactgaacaaatatgtattatctgcttcataggtatctagcattgtgttaggtacttgacatatcaggactcatcaagtcagtttttggtgggtttttgttttgttcccagctaccgttagccatcatgtgatgttatctattgatttgtttctgctcacaactgtaaatcaagattccagccctcctgtttccttttaccctctaaatcttggattccagcaggaggttggttttccttaacagtaaaatcttctgtctgagatggcttttttggtgtgtgagtggcagatttggacacttgtttcaggactagtcagctctgggagccaaatatggaactgagtagatttgtgaaggaacatgcctttagcagtccatgctcctgagttggacagtggagagtaggaatgcctggcgtgtggaagggcatatatgatagtaactcatgtaagttcagttaatgcatttctaacagttaaaaaagtaactcatgaaataaagatcatatggtacctacactcaagcggctaatcatataaggagaaagataagcagccaagctatgtatggtggtaaaggatagaaacacattccaaggaggttatttgattttatggacatccaaggacaggaaatgcagtgtagtcaggccacctaggactagaactggaaagtctcattaggttctcatctccgtttcttcacaagtctgtttcattacctcactttttatagtctagtggaagacaatgcaaagcctctaagaagacagaaaatggtagacctgttgaggaaccaccagaaatagcccaggataaggaaaggatgtcaccttttacaaataatgcctggtacttaataggaatacatgcactaactacctgtgaatagatagacttcataatctgtgctctctgtcattccttgggtgtcttcactcagtgaaacctgccctcagattgcagagtaataggtattgactcctgctgctggcagtgggcgataatgaaaggagcaggggcaggagtaagaataacagatcttcctaaccttgagccttcccacgtcttttcattaaaacatacatgtattgaatgccttttcccacaagtccaggatgcattgatttagttgtgtgcatctggcaccatgaacaatttttgtcccagtgactgaatgttataaataatttttgttgggcataattagaataaaaggaaactgtgtgttgcaattggaaatgggctatgaagtggttggtaaaataggaatggaggttttgtagtgaatccctggataatcttctgatgaacttgtggtctgtgctttactggcctctttcattaatcatatgccatcgtaggtctttctgaatcggtgttatgttatgaagaagtaagtgccttggggaccaagctgcccactgattatagtaaactttagatatgtttgattcagaatataattttcttttgattttaccatatgattttctgctgtaccatatatagaagaacaagaaataggaatgtcattctttggctgcagtgttggctctgtcctgctgtccagagaacttcttctggtgcctatatagagaaaggttgccagtcctgagcccactcagggacacattctctgcctattcagatacagcagagagcgttgcccagtgttgcctactcagaagccttcagtggttcgctttcttctatgacataaagtctaagttcctttaagactcttcacaatctgcccagcttcctagcatcatttcccaccagtctcttcccacacactatactccagcttcattcattaatagagcttctactgtgtgctaagctctgttctggccattgcaggtaaagtagtgaacaaaacaggtaaaatccctatcttcatggcacttagattctaatggatggggtcgattgacacagataataaactggtaaacaaatacaaaatagtaaaaataatgtatcaagtagtgataagtgctatagagaaaaattaatttgattaagggagatagggagtcctagaatgaggatgtggggagcaggtgactttcattttagataggatggtaaggccaggcctttctttttttttttttgagacggagtttcactcttgttgcccaggctggagtgcaatggtgcgatctcagctcactgcaacctctgcctcctgggttcaagcaattcttatgcctcagcctcccgagtagctgggattacaggcatgcaccaccacgcccagctgattttctatttttagtagagacgggtttctccatgttgttcaggctggtcttgaactcccgacctcgggtgatccacacacctcggcctcccaaaatgctgggattacaggcgtgagccaccgcgcctggcctgggccaggcctttctcataaagtgttgtttgagtggatatcagaaggaagtgaggacacaagctattcaggtaagtggagagagagcatttcagcaaatgtaacagctgatgttgggaaagagtgtggcatgattaaagaacattaaggacgccagtgtggctacagtgaaatgaatgaaaagagagtggtaggagaggaagttagatcagaaggaacccagatcactggggccttataggtgattgggaggatttcatctttcacttgagtgagatggatgttattagaggttttgagcagaggaatgacatgatctgacttccttttaagagaattattctggctgctatgtagaaacttagatggtcagaaagcaagagtagaagcagtgagttgatagataatccagatgatggtggcttggactagaatgacagtggcaaaaatgatgagaaaggagttgaagtgtgtatatattttgaagatataagagcaggtgaggatggcatcaaaatttttggactgtgtaactggaagatttgagttaagagaaggaatgcaggagaagtaagtgtgggagtagggagcagtcaggagtttagtttgagttgctgtctacacagatggaaagatagctgggagagtctaggtttgggagggggcggggcatagaaattgagttgcctatcagatattcaagtagaccatagagtagacagtggatatatagtttggagttcaagggagaggcccaggtaagatatataaatttgggagtcatctacatatagatggtatttatgttcatgagatcacctgcagagtaaatatagggaagagactgagccccagagtgctcaacacttagaggttatggagatgaggatgaactaacaaagaagacaggaaaggaacagccaaggaagtttgtagaaaagtaagagaatgtaaaatgtggtagaaataccatgaatgtgttctaggtaagatggtctgtatccatcttgactgaccaagtaaataagacccaataattgaccactagatttggccacgtggaggttactggtaattttgtttgtttgtttttgtagagacagggtctcactatgttttccaggctggtcttgaactcctaggctcaagagatccacctgcctttagaaaattaagtactggctgggtgtggtggctcatgcctgtaatcccagcactttgggaggatgaggcaggtggatcacttgaggtcaggagtttgagaccagcctggctaatatggtgaaaccccgactctagttaaaaaaaaatacaaaacttagctgggtgtggtggcatgcgcctgtagtcccagctacttgggactacaagcgattcaaggagaattgcctgaacccaggagccagatgctccagtgagccgagatcacaccactgcactccagcctgagtgacaaagcaagactccatcctaaaaataagtaaataaataaaatagaaaattaagtactcaataaatgttcactgctatattctcttttttcagtttttgcttttatttttgtttttctgtcacactgggctgctgctatcctgtttcagaactatagtgaaaatgggtagactagctgctctaacaagggatatgtgcttttcctagagagcagtctttgagatgtttgaccagtggcttccttccagtgcccccttgacctgcgccatgggctcacactcctatgccatttaaaaactgttttatgtttaattttctatttccatctgatacttgaatccatgtcatttttttttaacccattatcttctgtttcccttctcacttgaatgaagttgagagagcagaagcttggttcatcttctggctctcagtcttcccccaccccaactcccaactttgcttttgaactacaaccttttttttttttttgagacggagtttccatcttgttgcccaggctggagtgcaatggcacaatcttggctgaccccaacctctgcctccgggttcaagcaattctcctgcctcagcctcccgagtagctgggattacaggcatgtgccaccacgcccggctaattttgtttttgtgtgtgcgtgttttgttttgttttgttttgagacagagtttcgctcttgttgcccaggctggagtgcagtggcgcgatcttggctcaccaaaacctccgcctcccacgctcaagcgattctcctgcctcagcctcccgagtagctgggattacaggcatgtgccaccacgcccagctaattttgtatttttagtagagatggggtttcttcatgttggtcaggctagtctcgacctcctgacctcaggtgatccacccaccttggcctcccaaagtgctgggatcacaggcgtgagccaccgcaaccaggcgaactacaacttcggatgtgattgttcttttgttctgtagctcaaggctagacacgtagggaaaatgacgccatttgctggaggattggattgtctttgttcaggctgcaaaacagcttttgcatcaaagttgaggtctaggagaaggccacctccttgagcccttcttgctagctagagtccatgttccagcatgccaggactctccagtgatttgtttttatcttccctcctcctgagccttcatctttgagagagaacaaagtggaaatagtgccaaactctgtgttataaagtatagtggttttgccgctttagccttggtcgactcactttacatttctgagttgcagtttttccatctgtaaaatgggaataataactcatgaagtttgactctacagactattattgtaagataaggatgcaaaaagcttgataaactaaagcactgtttaggtgtaaggcagtattattactctcctcacttctttatccaggctggaccaggcttgcagggaactggtgccagactctgtattttcatttttactttcccaggatattcacctatataaggggcagaacccagtgaggctcctgaccccataatatcttgtgatggacttccatggtcttgccatccaggaaggttcagcaacatagctaaactattgatttgccaactctcagctcctcccagccatggttgttatagctcggtaatgtgggtctgagaagctttgttgccttctctctactccattggagatgccaaggaagaattgttatttcatcttctcttaaaactttgacttgtctcctgtagatgcttggccaggctgtcagaacatcctgggagttaatgagagaaaaatacatatagctcccactaagtgcctataatgtgtcaggcactatagttagtgcttatcttgtttaaacctcatagcatcctttgaaataggtacttattatttccagtttactgaaaagaaaactgaggttcaaaaaagttaaatcccttgttctaagtcacatagtgagttaagttgcagagctagaatttgaacttaattctatcttattccaaaatttgttgttctaatgaccataccatgaggcctcctgttaccatacagaaagaggggccatgtgctacataggaaaactcaggagatttccattcatatgatctacatgaagatcccaactgcgcctatgcgatctgggacaagtggctttcaacttgtccaagccttagatactatctcattaacttgtcaccataggtgttttttttggggagagggggagattatttatttatttatttatttatttatttatttatttattttgagacagggtcttgctcagttgcccagcctggagtgcagtggcaggattatggctcactgcaacttccagctcttgggctcaagcgatcctcccacctcagcttcctgagtagctgggactacaggcccgcgtaaccacacccggccaatttttgtatttttagtagagacagggtttcaccatgttggccaggatggtctcgatctcctgacctcatgatccacctgccttggcctcccagagtgctgggattacaggcatgagccaccgcgcccagccagtagatgttattcttatctccagtttacatttgaagggaacaggcctcagtgagttcagatgacttgcccacggatgcagaatagtaaatggcagagccagaactcaggtccaggtctatctaacacctgcttcagtgttctttccaccatttttcacagccagcttctaagacctggtgtatcattcagctagatttatagctctgaggctgctggttggaagctggcatccttttctgctctctttctcctcccatactttctccctcttcttagaaaccttacagaggcaatataggtatttgaaattcaaagaagagatttatgccgtgcttaaaatctgctcatactgccccattagacacctgggaatctgcctctcgtcttttgtatgggtttgtactgttactttggtagcatgatgtggtgggtatagttttgggaatgttctttctcagctcttttctttatgagtataatcttgtgaggtggctgtaaagttagagatgatgaatattcaagggtagcaagtacaggcttattatttgatggcagttatttcccctggcaccaggatctaatagaaaccagaatagcagtcaggagttctaaatcttttactcctattctttgaccttggatatgtgagtcactgtttctagatagactggctagtctttaggggcgcctttcagctttaatgtcctgcactttaaaaaatgaaagtaataagatacttgtttaaaaaaaatcaaattagacagaagtatttgaaggaaaaagtgaaagacccatatcctttcccccattcagttcattcccaatgtgtaacacttattaccagtttgatgtatccttttcagtgttctctgtgtatactaaatatacacaagtatgtgtaacatacacagtttatatcatgtgcatatatatataaatacacatgtatatgttatacgcactggaacctacaatacatattatgtcttggttcttttacttaacatgttttagctatttttttcttgttggcacttaaagatttactttattgtttgcaatgtcttatactttttttttttttttttttgagacggagtctcgctctgtcgccaaggctggagtgcagtggcacaatcttagctcactgcaagctccgcctcctgggttcacaccattctcctgtctcagcctcccgagtagctgggactacaagcacctgccaccacgcctggctaatattttgtatttttagtagagacggggtttcaccatgttagccaggatggtctcgatctcctgacctcgtgatccacctgcctcggcctcccaaagtgctgggattacaggcgtgagccaccgcacctggccacaatgtcttatactttattaagtgttggctggacatggtgtctcacacctgtaatcacagcacttcgggaggccaaggtgggcagattgcttgagcttaggagtttgaggccagcctgggcaacatggagaaacccaactccataaaaattagcagggtgtggtggtgcatacctgtggtcccagctacttgggaggctgaggtgggaggattgcttgagcccaagaggttgaggttgcagtgagctgtgatcgtgccactgcactgcactctagcctgggcaacagagcgagactgtctaaaagaaaattaagtggtcccctattgattgtgtgctataatttttctttttttctctttttagagatgagatcttgctatgttagccaggttgatcttgaactcctggcctcaagcattcctcccacctcggcttcccaaagtactaggattacaggtgtgagccactgcacctggccaattatgtgctatgattgttaaaagcaaatatacacatacagtgttgatttttaaaattttcttttcaggagaagaagaaaaagaaacatagagataggaagtcatctgactctgacagctcagactctgagagtgatacaggcaagagggcaaggcacacatcaaaagacagcaaggcagcaaagaagaagaaaaagaagaagaagcacaagaagaagcacaaggagtgagagtataaagagtgtagggggtggttgagagtaagaaaccaggagccttgtgccttgagactcctggaaagactcaatagtgagaatatagcctcccaccccattaacttcgctcccatgggagatggcttcccctcatgcaacaggcaggtttgggagttagaggtcaaaagcagctgcctgaatgagttgttgtttccttatcactcctggtccctttgcaagtgaaccctgcagctcacccattcattcacccaacttccttcattcagcaggaggtcctattaccctctccagctgccactgccagagctggattcctgtaaaggagtccaggctagagccacagagactgttgtggaggtgagttcggctgtagttagagtgattggacccttcctattggtctgtcctgggccaactggtgggtgatctctgctgcatccaacatgggagcagagactggcagcaggaggggggaacatggtgagaagtggtgctcacttttcccattcctcctaacatagttctactatgctagaagtggcatccagcggccacagctagaaaacagtctgcagtgtgacttaacttgtgtattgcattccagcagaccactgaaccagacagcgaagccaagatcattgttctactttgtatttactactgtgtgaatcagttgattctacttcaggtccttgcttaaattcctgtcactaaatggaaatgtgtttggttttaaacttactgagttatttttcctataatccttcttcctgggtaacttacagacttaaagtcactgagcctgcattagctgacaaaaacatttaatatgttaccttagaccttggagagatgcccagcagaggtacagagccaaaggcactagcagatcactgccttcttgggagatcacttataagccctcccttttgtaatgatcagatgccctcttccctcagagttgattagagaagcagtaagaatttgtagtcataagtactagcctggtgcacaggtcagcagtcctcttggccagtggtcattttctcccaccaccatggtacaagcctgggttctgtgccctgaacctgaattctggaaagggagagactacagcatttcacagagaacagccagacccaagagctttcagtgtaggatgggcctgaagtgacagttcaatagccaaacctggggaagccccatcactgactgaactaggtcatttgaccatggagggggggcagtgtaaaggcaacgtgtaggtacagctcttttattattaaatgtgtaaggtgatcagctgattaacaggctccgagactgtccatttcagtctcccatccagtgcttcttcctcagtaaccttcaggccgttatttctgcccactctctgacacacaggataaaccaagactcccagagttatgttaccaaaggcaaaaaggcaactgggtggccttggctctgctttattgacctcagagcaccctatgagtgcagttaaaaaaaaaaaaaaaaaaccacatacaccatgggaactggaactggatcccggtcagtggcacctgaccccagaagaattcgtggatttgtacaaaatgcagaggaagaaatgaggcaatgtggtgctgagtcgaggggtagccgattggcagagtagtagtcagcaacagtgcagtcaggtcatgcctctttctcataagtgcgagtgcaaactgcagtgccgtgggtgagtgtctggaaggaaagacagagtgagatggggggtggagccaggaacaccattgcgagcattctaccctcccttcctcctgataattgtcacttgagtacctactatgtgccggctatatgtatgtatgtgtgtgtgtgtgtgtgtgtgtgtgtgtgtgtgtgtatacatacataattttttttttctgatatgcacagcaaatccttaagataggcattgtaattcttattttagagatttggaaaaaacgagcctttagagaggaagtaatttggtcaagatcctgagtgtttttccttcccttataccatttggcttccttcatccttagtgtctaagatggtgcctggcatatagttgacaaataggaaaaatatccagagactcaggaaaggactgtgtttggctactaactccaatccttccctaacttagagtagtgccagggccagagccctgtacctcccactatccggtctggcatcatagagccagacccatggcctcaccatagttcagctgccactgagaatttggtcctgcatatcacatccccaccaaagctaggcacctcattccaaacttcaaggggacccctgtcccacatgagtacaagaatgcagttaacaggttatgctgacccaagaaggtgtgcagtgaagatgcctaggtgaaaacctgaggccctgtggttaggcagaatccacagttggctgctctccctgggtctggggggaattcagtcaaggctagattctccaagtgaagtccccaagcttgaacagatctgccagcctggctgtggtacttcctacccaagcagtagtcaagtagtttcagtaggccagacatagaaagcatgaaaatggggtaggactagaatggggaagaaaggactgtactgtcattcagtgtccccaccagtcacgagcctgtccctgcaagtgacaatgcagtcctagggaggagaggaaagggaatgctgagataggcaatgggagcccctcctagagggcctgggatcagatttggccctgttttctacttcttcctgaggtgaggcaaggtagaaacacaggaagagcaaacaaaggacatggagcacctgctgtgttcctcaatcagtgatgctttgtgctgtgcatacactgtctcttacaggcttcccagcagccctacaaggttggtattattaatacccgttttacagttgcacttggaaaaggtgatttgcccacagtcatgtagcctataaggtaagatttgagttccggcctgtgtgagtccaaagccactacacagaaaattcccacctgataccaccctgacccacaaccactctcttgtcccagcttctacagctctcaggggaggacttggctttttagaacaggcttggctgaaagagcagtagtaataaccaatcagatatagctccaaagttgcccatcttaccaggatgagttttccatcaattagctcccgcacaagtgtggtctcttgcccgtcccatttctgcaggtgaacaagtttccctccatccagtgtcacaatggactgtggaaagagggtagaggcctgagctgtgatcttagtcaggaattgaggggcagggtggggtctggacactgggccacagagcacacagcctttgacccaaactagtgatggtgtgaggacaagagctcaggcaatccgcctcccagctatccctgcaagacatctagttcacctccagcctctgctccactactgcctttctggggaagaggccttcagatattaggcaaggagggagaggcaggcagtatggtggagccagagagcctggctctgagaagtaccacaagccttcaagacagacacttatctgtactctaggtgattcccgtagcctggtcccctcagatacaggtgggatttactagtctatccctgggaaagactgactgaggaggaggagtagtcctgagaatctttatccagccttgtggttagtccacataatgtctaaaagacccttagtgataggaagtattggataattagacttcctgccctgtattcctacaccttttcttggtccacatcatgtgacctctttagccaacaagagggcagcaaccacaaagtcctgtgactggatgcccttgaagtggttcctcagctctgggtgctgccagcatacatacatcagctggttctcatttggcagctcttccagctctctttcctaggagtttgggggccacaaggccaggctaagggatcctgatgagcaaggtggttcagtaggagaatctgagaaggttctgtgtattgtttaggtgataaggggtatgaggcctgtctcttagtgtgctcttttttatccttaccttactccttgttctcattcccctagttttttttgcctactcagagtagatatttttgccctaggcattccacagggctattgtgtttaattggggttcttgccccttgagaaagtaggcaagtccaaggaggtatgagcaggtggtggggcagccacctttatccaaggtagactgccatctttgggcaccatccccagctctgctgccagccacctgtgtgatcctgttctttctggggacagctatgaggaagaggaaacagctgatggggctgaatgatagtgtcatgatagaacactgctatagggacaccctatagaggtcaaagcccttaagttctctcgctcccatgcctggcctggaaggctgaggcaagctgccaagacagccactgcagggtgatagaaccctgggaggaggggctaaggcttggtgggaagacactgcaaacacattcatgacaaggtgaatgccctatcacggaacatagctcttcctgcctgtcagctggcaacactggaaatagtttgtcagggtcattggccatgtctgggagttagaagttgaagcggcatctgagtaggtgcttctagttcctggctgccttttttgctgctggaggtcacaatgacctcactcagtggagggccctgacttctgggcatcattcctaaagcacttcaggtcacagccatggccacataactctgccatctatggaaggggaaagaaacctagagctactgcataccttgcacagggtcacccagctggagctggagtagatactgaggtcagaagaacatcctggctctgtgctgcccattccgaggcagacaatagatgaatcccaagaagggagggaagaaaacaagaggacagaactgacatgtatttagcatcagtggcattccagcactacacaggctttatgaatcttgtttcatttaaattccccatgatagtctgcccctcagggtgcaataccagggagccaagactaccagcctattctcttttagagtctcagcactctccattccccacccctgtttccctgacttaccttgaccttcctgtcatctgctgttgtctcatcgaactccacccccaacttaaagctgatctctgtgttcttgaaggtgctgtgtgtttttagggtgagaatgtccccattcttttcgatgattgtggtaggcttggtcatgctggccacctgcctggtagcaaaacccacacctgagggtagggggaaggttatgagtatatgagctggggtagagaagcagtgtacaagaaactcaatgaataactctcaggcctgggtatggggaagtggaggactgtatctttcaaagcctttgcatgggaattttaaaattcagtcttgcgcttagttctgtttggtgaacacagataactgatcccattagatgagagatacttaaggaacagcagtgccatagcaagtcagtggcagagctgggattagaataagctactattgggccaagtgtggtggctcacgcctgtaatcacactttgggaggccaaggcaggcggatcacatgaggccaggagtttaagaccagcctggccaatatggtgaaacccgtctctactaaaaatacaaaaaattagccagatgtggtggtatgtgcctgtaatcccagctactcaggaggctgaggctgagaattgcttgaacctaggaggtggaggttgcagtgagtcgagattgtgccactgcactccagcctagccaacagagtgagattccacctcaaaaaaaaaaaaaaagctactattaagtactatgagctttttgtgtagtaagaactgtacatgttatctcatttagttcttcctgttcttctgaagactgtttccacgttacagatacaaaaacagaggtaaagcccagggtcacaaatctgagattgaagcccagaattgtctgagtccagagcttgcttaagtgctcagctatactacctcccaaggctggagcataaggctgccttccagggcacctgaaaagctctcaaagccttaggaataaggctgaggaaagaagagaaacatagactttcccttccaaagccttaggcataggagttttccaactttggaagtttttaccctgaaactaagaagtgttagtgctcttgtcccttatacatggcaacccatcattttcaaagcctgttatctatgatctaggagttaggtacaaaggaagtatttgtcctattgtgcagattcaggaggagcctaaagcggtagcaacaatgagttagactcaaacccgtctcctgactcccagtctaaggctttacagagactctcttcctgacccaagcatggcttccttgggtactgggcaaagtcctaagtgtcctgcaaccaagtaaagaacaaagaactaatcatgactgccccctctccccccagcagcttaacattgaactgtcttccaaggcaaaggtgaggcaggaggcagcccagtgtagtgaggtggtgtgtgtaaagtctccaaatgtacctggctacatagtgcttgctggaagctaggtactctgcacatgccctacatgggttgttttacttaatgcttgtaacagcctcgaagcgtagattatccccagtttacaatgaagagtgcgaagtgtcttgtcgaaattcaaagagaataaactactgacatagatttgaacctcggctccaaaactgttgactattttcactgggcgattctgtccagcacatactcaatccaggccagcagttgtgcctgtggtcactggtactagacgggacctctttgccccttgagagccctaggtctacagcaggaggggcaggggctgcctctgctgttatgctgtcagcccacccttgcttggccagtgaggaacttggcattgccccttggtatcaggatgagtcaggccaatcacactcccttgcacagagcaggaccttgtcacggcactgggagctctgttcacttaggatctacccagaggtatggagtgtttgaaaaggaaaccactgcgggatgagtgagggtctgaaccaagagaaactaagaatattgagctgacagaatttaggagactcagggagatctgggttctacttagaaatgaagccagcactacttactgagagctgaggagggtattttcccaggctttccattcctacgatgagaatgctggctgccttaacataagctgctgaaagataacaggacttcagggagaccagcccgctgacccaactcggggcagaataagggaacaagaatggtaaagttgttgcagctcaattcaagactcagctctggcccagctttggaaggaggaactaaatctgggcattccaacttcccaatagctgctgggctgtgttcgtgggggctgggggctgctcctctaagaatgactgcctgcctagaattactgggcatagcgcccaagatagggtagaggccgttgagagctttgacctctccatctaagcccaaagcagtagaagaagggctgaggtcaatcattagctaagcagtttctacttttcttcccactcgcagggcctgtagggtagtgggaagagctctgggttacagatctagaaaccttagattttcatattggctctgctgtggaattgttataatacatttctactctcctggtttcagtttccctgttgaactagatggtatgggaatctccaagttcctcacctgtgagattctttgaatcctgattcttctccatcccaacaccacagcagttctccacatcctcctaaaccagtgatcctccctcccaggtcttgaccttgccttgggaccctctactgcacatcagaagtccaatggctttctctgcctacccctcgcacagataggtgagccttgggttgcaggaaaggcccagctgatcatgggcctcttgccccaccctaccacgaggctcacagacagtgatgaaggcctggatacatagactgcaggacaaggtcagactggctggtgagaaagggcattctccagcaagaattctcttccctaaccaagcagagatggggattgctgcttactgcaggttcctgtcttacgtccttctcatatctgattcactgatccacagttttttccccactaatctttttcctcctaggtatttcctacttgtttacatcattgtacactccctggctgccccattccctttctgggttcagtctcctccaatttctaaactacccatgcccctgttctttttctcccctggctacactccctttcctgtgatcagtgttctttatccaaaccctcctcctacctccaaatcacatatccctcttcctggaaagagcctcccacacagctgcctccttccaccacctccctaccgtggtctctaaccagatttggaccaccaaagccccctctgaacaggccccacctgctctaggccaggctgccatctccgcgctcccctattccccagtcttaaccaggagggatgcggcaggagtgctgcgtggggctaggcacgccaccagccagtccccaagccaacatcctgagccccgcggcttgctcaccgagtgacttcatgtagtcatcgaaattcttgctgtccactagcttccaggtgcccaggaaagcgtccaccatagtgatgctgggctaggctgagagaagctacaagagagcaggcgtgcaagggctccgacggcggctccctgcccgggctgccgctttaaatagccctcgcatcacatgaggagacgtggcccacgcccccggctcccgaaataggaagccccaggctagggctcacccaggaggggctggtgcgcccatcccccaacccaccgaggtgggtggggaccagccagtggcgccctgctagcctgcgtcagcgccagtgcctggcccccgagtccctaccccaggctggtaggaccttctccctttcctggcctctaggcactctggaatctgagaaggaagcagccaacaccagcccgagagctagggcgcatgccatggtggatatcttcccgtcccccagtccctctttgagcttagcgtcagagcagagatgagactagaaaagcaaaacgcccttgggctggtgcccacgccggggaaagctctggttgacttctggcacgggcatctgtcctcgttttacaagtgaggagtccgaggctcacaggggaactgacaaggtctcaagaaataggagggggtgaatggagctcagattgcaagcttagtctagcgggcttcagagctcgcgctctcccttcactctcactgcctggtggcggagacagtcaccagcggctcggtctgcggctgagctgaccttgtcctctgcctgttttgagcaaaagcctgacccttcgcgccccgcccgcctcacacgtgcttgcccctccctgcggaatgtctcctgctggccctcctccgtccccaccccaccccaccatctagctccccacccgcccctgcaagtgctctgggcttttccggtttcttcgcacagctccgagctttagctcaggtcgttcccagctcccctcctgcagaaattctgccaattcggtcagctcttcaaggcccatggctgccttccccacctgccgccctttctttggcctgtgcacactagcaagccgcctgcacttttgggtaatttgctgcctcctttcgagagcctgttgtgcggtggtttgtcactgtatagtttactaagcactttcagtaaaaataagacctgccttgtcttgctatttattgcatgctgagggctttgggtgtattgtttcattgaactttttattttattattattttttagagacaaagtctctcgctgtgtctcccaggctggagtactgtgacgccatcatagctcactgcagcctcaaactccggggctcaggggatcctcctaccttagcctccccagcagctgggactataggcacacgccaccacacctggcctcattggacttttaaagcaaaatccatgaagtaggtgttactgtattattttctctttttaaaaaggtgaacaagttgaagctctgaggagctcactcattaattcagcagttaataaagcacctactttgtgccaggccctgctttggagagagacaacagggaacaagacacacattcacctctgggcagccagacataaaactagcgtggtgcctctaaagggagtcctgtcctgtcctgacctgagggcccaatgtagacttctcaaaggaagtgaggtataaatgaatttctgagggatggcaggaggccctgcacaccaaggagtagtgccgaactgaatttcagccagcagcagcctgtccagggtgggcctgcaggagccaacacaggagcccagaggcctgccacgtgcgtagagtatggcaggccctccttcctgggactctgtttctccatgtgcaaaccctgcctcccttccctggactgttctgagaacaaggccagggaggaagagccctctccccaccctaagatcttgattcctttggacggtccagttgccagaagactcagaggctcatttctgccaaagctatagggacaggcttcagggctgggcatggagccttggtgatctcactgttggaacaggtgccaggagaggaggagggggaaaagatgatttctgactcaaggtcgcagccctcacacatagggcctcctctcaaggactgtgtggccaggaactagaactgactccttatgtggcccttgtaatgcaatgatggagagctggggctgggctaatggctgctggcagatctgcgttctgatctgaattttgttgggtactagctgtgtggccttgggcaattcacttaagccattctgagtctccatttttttttttttttttttgagaaggagtctcgttgcccaggctgaagtgcagtggtgtgatcttggctcactgcaacctccacctcctgggttcaagcaattctcctgcctcagcctcccaagtagctgggattacaggcaactgccaccacatctggataatttttgtatttttagtagagacggggtttcgccatgttggccaggctggtcttaaactcctgacctcaggtgatctgcccacctggacctcctaaagttctgggattacaggcatgagccaccacgccagcttcagtttcatctttaaaatgaagggatttttttttggagatggagtcttgcactctgtcacccaggctggagtgcaatggtgttatctcagctcactgcaacctctgcctcccaggttcaagtgattctcctgcctcagcctcccaggttcaagtgattctcctgcctcagcctcccaagtagctgggactataggcgcgggccaccgcgccaggctaatttttatatttttagtagagacggggtttcaccatattggccaggctggccttgaactcctgacctcaagtgatccgcctgccttggcctcccaaagtgctgggattacaggcatgagccaccacgcctggcctatttatttatttggagagagtctcactctgtcactcaggctggagtgcagtggcatgatctcagctcatggcattcttgacctcccagactcaagggatcctcccacctcagcctcctgagtagttaggactacaggcgcatggcaccacgcctggctaattttttgtgcatttttttggtagagacagggttttgccgtgttgcccaggctggtgttggactcctggcctcaagcaatctgcttgcctcggcttccaaagtgctgagactacaggtgtgagccacgacacctggcccgagataatacatttaaatgctaagcatggttgacttacgaaagttcactgctgctgctcctcctgctgctattgttattgtctccagggatagtgcagacacctaagacctagtctgagctctgccactacctactgagttagttacctgaggcagattgctttgcttctttaatcctcagttttattatttctgggacaggattagaaagggcttcaactgaaaaaggggctatagaggtttttcagaatgggttggggtggggtcactgccagaaaatccatttgctccctctcttgggcctgtccaaattgagcagcacggggctttgaggagctctactcgacaaacctcagaccaactaccctcactgcccttccctcacctcgccatggtgctcagacctgggtcaccgaggttaacccataagccacaccccatctcctttcctcctggtttacacccttctcccttctaagtatgtacagttctctcctcatccctctgatctacctgcatcctcttcctctgttatgctgactacatttggggaagaatgtgagccctgtccctttttgtactcctctgtcttgcccttggcagatccagatgtggatataacatctggcaggcagcaagaccagcgcctgccaagaacagcatctccccagccctcatcctatggtgaggtcactgttctatgtttccacggcaaccacaggctgggaagatggagaagaggagagatgagtaaccagaagccagccaatgagatgagctgcagcaccggatgatccatggggccatggggagcggggacaagggaggcctgctcagcatgttcagctgtttcctggaccctccctgccatctggatgcctccactagagaatgtgctactagcaccaggaaagagctagaggctgaagaagctgagtagaagctctgctgacccaagaacatggccctccttttttgcctcttcagggtctaagtctatggttgctgactacccccgccccatcccacccctaatatctgcaactgggaacttttcccatttgctgggaatgatggtggggctctttctgcctctgcctgccatagaaccagcaagtcttagacatcccttctttttatgcccttggtccatggggtctttgttaccagaaaggggtcccaatccagaccccaagagagagttcttgcatctcacacaagaaagaattcggggcaaatccgcagaataaagtaaaagcaagtttattagagaagtaaagaaatgtctgtttagtaaattattaacctgttcccttaactcttaactgtaaacattttgtgactaagaatgtttcaccttgtgggaatgcatcccagccaggtctcagcttcattttatccagcctctattcaagatggagtcactctggttagaatgcctctgacatcttcagatgcagtgtctttggaaagagccctgattctaaactccaggcctgcatttactagctagagacctagaacaagctccctttcccccttctgagtcttgttttctcccaaatagaggaaggccatcaacttctcagggttgttaggacaattaaaagagataacaaatggaaagcctaccgtgcactaatattgaaggaatagtaactcctttctcctttcctccttccagttcttttccccgggatatttgagtaagccaaggccctttgagaccctgaataagtaggaaaggattcaagtatatggccaactcctcttcattgaggtcacagagtggccttcagatcttggacataagtttcctcatatttccctttctctctctttaaatattcattcattctaccaatcttaattgagcacctcctatggccaggcactgtgctaggctcagtgaggatccagggtgaacaggagagctccctgctctcacttagctcacagtgcagggggattgcagctacagtgggtggagtgttctttctgccactaggaaatctgcttccttgttccccaagagttccagatactgtgggctggagagaacaaatgatggcagaaggtagaggtttactcaacaccaatttgcttctaagaaactgctgcctgtggcagaatgctccctgaaatgagaacaatgaccctccctgccctgggggacagggggtacctcagtggggaggggcaatctgccttctcagaagccatcctctccctgttgctgacagaagaaagcccagactgtatagcctggtctcatctatttccttggtctaatttgttgctgaaatcctttttaagaagagtttctggcggagaataaggtatagtatattgacaagatcgggtgcattcagggtggtatggttgtagacaggtacagtatattgaatgaatgaacaaatgagtgagtgaaggagagaatctatctacctccctagttttaggggctctggagtgagacttgggttccagtcttgccatatgtatacaacagctgtgtgacctcgggcaagtcatgatctcactgggtctcagtttctaaatctgcaaagagcattatcactattctcacctagccagcctcccaaggactctgagaagctaggggaggacaaattgaggaatgcagcacaaaggatgtttctccaactcctggcctcaagcgatcctcctgcctcagcctctccagtagctgggacaggcgtacctggtttatgttttttctcttccagcctccttccttggctgcctgtggtccttagcacaagacccactttctttgacatgaccccatagccacagcctaagcatcacagcccacacactctagcccctacctgcctctcccagctttccacacacactgcagccattctgacctttttgtaccttgaggggacaccatgtttctctctttatgtttgccagcagtgctcttcctcacccctacagtcttttcttttttaaaaaatctttatatatatatatttttttagacagtccagctctgtcacctaggctggagtgcaatggtgcaatctcggctcattgcaacctgtgcctcccaggttcaagcgatgttcatgcctcagtcccctgggtagctgggattacaggcatctgccaccacacctggctaatttttgtatttttagtagagatggggtttcaccatgttaaccaggctggtctccaactcctgacctcaagtgatccacctgcctcagcctcccaaagtgctaggattacaggcatgaaccaccacacccggccaactcctactcatttttcagctttcagcataactatcctgcttctgggtaacaccatcttccctggccttccctatcctgctttgatgtttgtttcagagtctgtctttgccattacaccggaggcccttagagggctgggacccagtctgtgttgcttcttgctgtgcacaggacctggcatgtatttgtggagtggacagtctctccagagaaaaagaaagccacttgttcttgcagtgttctctctgttttgaaattctgacaccatcaccatctcctccactactctcaactttcctcctgccaaagtatcctgttttgtgtcctctttctcactccatccctgagggccagtagcctgggccacttcctgtgtgtggtggggccccaagtactcccaggtgagaattgccctttggaaagcatgagggtagcctggatctcaacagcagcttttttggggggatggggctattcccagaaagtgattaaaccaggccccagacctggggctgaccctggctccctcctcaaacttcagtttccttttctctcaaatgaaaaaaaggttgcctctgcaaaactctaaatagcctctaatattggattaggtaaagtataattagaaaggtaaaccttaggcttataaaatggcacctcacatcaccatgaggtctcaagcatgttcatgtgccatgtggcctggcctccatcccctcttctggcaccaaacacatggtccagtagtcatgcctcataatgcattctattcaggaacagcttacccaagattgtggaaggattcaagcagctcccggagacctgacgagcctggttggtgtggacagatgcccactgttgtccctgggtgaggagagctggcaagccatggcagggtggctggcagggagtgtgtcttggcctcaggagtctgaggccagatgtgttccaggaagcaagtacaaagccaacactgtcagcctggcttgggctgagatcttgggagttatccgggatgggttgatggggcagcaacccaggactctatagtaaacaaagacactggataggaaaaggaaggagcccatttgcaggaaggactgggtgggctgggggtgaccaggactggagcccagggtgaaagatttctccttgtaaaggttggcggtgggaggaccatgaggttagagggataggatcagagtcaggaaaagataaagtcagatgaagaaggctgtccttagaatgggatcaccctgtgcaggagtaaaaacagtccaggtcatgcctgtaatcctagcactttgggaggccaaggaggggcagatcacttgaggtcaggagttcaagaccagtctggccaacatggtgaaaccctgactctactaaaaataaaaaaacattagccaggcatggtggcgggcacctgtaatcccagctactcgggaggctgaggcaagagaattgcttgaacccaagaggcagaggttgcggtgagccaagatcacgccaccacactccagcctgggcaacagagtgagattctgtctcaaaacaaacaaacaaacaaacaaacaaacaaacaaaaaaccagcccaggcagcactaggagtcatagtaggctggtatatgtctggctaccgattcttctcccaccactggtgagccagtttatgacctgtcagaggaaatggggaggaggcataaagaccaccaaggaaagttgggagacacaatacctgcatgaacttggacaagtcagtctctctgtgcctgtttcctcctctgtgtgatgaggatagtaatgtctaacctttcgagagaataaatgagattgtgggtatagagaagctttgtgtgctatgagccaggtgcagaaaattgtggctaacattggtgcagcactccctgagcactgcaccggacttagcagctttttgtctttcaaactcatgtcaccctgacgataacctagtgaggcaggtactattctcatccctgatttacagatgacagccaggatttgcactcagatagagtggttctagagcttgcgtggcttaaccattattctacactggctctccctgtgacagtgttcaccctgccttctctgtgaccttgggccagtctcttttcttcagtgttcccaactctatggtaggaggttgggccagatgatttatttaatccctcaagctttggcagtcagtggttcaggaaaggaacttccaagtaggggagagggcgaggtggggccagagcagagacaggacaaacttttccagtttgtcatcagtgagtaggctggtagactcccctttgccctataagtggggccaagggagcaggtgatgctcagccccagcctgaaatattcactggtccctgaggatcactgaggtctgaccaccaggtccgcctgccaatagtcaggcaaggcccatctgcttctgctaacagactccagaggattcttcttcagtattcagtctctacctgcccattctgggcccctgtcccctcacccagggtcagtttatctgggcaccaggcctggtgtggggcctggggatggggctatttatagatgtcttctgtctccttggcctgggcctctagccagattaggccattcacacacatgcgtgtgcacacacacattttctctgtcaatcactcattgaacttgactgtcactagtctgatgcctggcctcatgctgagtatggataaccaacagatgacctagacttggtccctgccctcatagagggatgggagaggtggacttgtctacagactatgacaatacagaaaggctattactatcacatagggctgtctctataccatggaataccatggagggagggagccccccactctgccagaaaagtcaggaaaggcttcatacggaggcactctttgggctgggtcttgaaggataggcacataggagtccactagatgtggggaggggaattgggaaagcagaggagaaggattcattgagagaggatgagattttcctgatgattgccctggggtgacagcagaagataaaaatggcaagtgatgagaatggaaagataatgtagggcacacaggagaagaccttgctcatcatccaggagtctggccttccttctgaaagcagttgagagtaatggaggatttcgggcaggggaccttcatgatctgatttgtattatgggaagagttccctgtctgctgtgtggaggctgcatggaagatatcagttaggtggctgtggcagctgtccagactgcacagtctggcagggctcagccatgcacccactgcaactagagagagggggaaagggaagaggacacactcctcctaattaaaggcatggcctggccactgcacacatctcttctctcttggctacatctacatgcaagggagactaggaaatatagtgattattctggacggctttttactctagaaaagggagagagtagatatcagggtactggaggtctctgatacagtggttaaaagtctctgagccgggcatggtggctcacacctgtaatcccagcaatttgggaggccgaggcaggtggattacttgaggttaggagttcgagaccagcctggccaacatggtgaaaccccatctctactaaaaatacaaaaattagctgggcatggtggtgcatgcctgtaatcccagctagtcaggaggctaaggcaggagaatcacttgaacccaggaggcagaggctacacagtgagccaagatcgtgccactgcactccagcctgggtgacagatcgagactctgtctcaaaaaaaaaaaaaaaagtctctgaaatcagatttctgagtttaagtcctgccttaaccacttaccatctgttcaggcagattactcaccctctcttgtgcctcaattacctcctctgagggtacagtgagctaacacacaccaagtgcttagatagatcctggcacttatgaggcccagagctattttctgtttctaagagaagtgggggctctgggaacaggtattgcctgactccccaggaatcgctgaggcacccacagtggggcagatgtctggctagggcagccaggactatgagctgtgccctttagctccattctctcaatccccatggcttagctgaggcagacgatgctgggagcagggtatgggggtcctgggaaaagaaaggaaggtggattttagagataattcaaggatagatagcctaagaaatgaagtctctggatctaggggcttcagatgcagcccagcctggagcccctttccctcacaggacaacagatctcccagggccatggtggggcagggaaggggaggtggggtggctagtcaaggtcaccttgactagtgactccagacttggctgctgtgtgacctcaggcctccaaccaccactgaccttctctgggccttgatctttccatctggaggctgggatcacttcttgccttcctgcaaggtgaatgtgaagattagatgtcagtcatagaatcaggttgctccctgcagggctgagtgccttggagggatgtgtcagtagcagatgacagtgcacccccttccccagaaggagaagcactgcagctcagtccagctaagccatgactgcctgtcctgccttcttcctcatttgagctatgctcttttccctaggctactggttgtaaaatagggtgggataagagagtaatgtgggagggaaaggatgggtggaaggaaacaagagggaggaggatagcaacatcaggtgaaaggcagaatggtaagattgagggctcacggctgaggaaaatgaaaacttagaatgaagggggaggtgtctagaattagctttgtgggaacccactctccccatattcaggcgcagatggggagcttgctgagggtagtgctgtgccttattcatctctctgtcctcttctcagggcaggacatagtataagcctccaccgaaaacagttctgctgtcagagtttgttgactgaaccccagacttggccccccactgagccttcatgaagcctccccacccaggccctgcttacaggaggatctgaaaggcagccttgagaaggaagggcagctgggagacaggagtgtgggtcctgctagggctccctcagtgccttgctgtgctacctgggacaaaccacttatcctctaaagctctttccccatctgagtaatgtgagaccatggctgtggtttgagagctatttttactccattaaatcctatcttcaaacaaattcttaggccaggtgtggtggctcttgcctgtatttccaacactttggaaggctgaggtgggaggatcgcttgagcccaggagtttgagacctgcctgggcaacaaagtgagaccctcatctctacaaaaaaaaaaaaaaaaaaaaaaaaaaaaaaaaaaaaaagtaattagctgggcgtggtggcacatgcctgtagtcgcagctacttgggaggctaagcgggaggatcacttgagcccaggtcgaggttgcagttagtcatgatcacgccactgcactccagcctgggcagcagagtgagactctgtctcaaaaaaccacaaattcttagttggaagtccaggagataaaagggatcttcaccggtggaagccaggaagggtgttggaacccacttatatggtcctgggggtctgcggaggccagtttaaagaatggaagctgtgctctctgggcctcaagcaggcctggctatcccacccctgcctactatcccatccccactacctccacatgtcctttctgcagcctgggtgggaatgggggtccagtcaacttgcaaagagcaagcagtgcccctcttgaggctgtctttcaatctctgggaaatagcaccactcaccccagccccaccccacacagacacagtggtcttgccctgggtcacttgggctgggggaggggcccagagagagccctcagattccagagactctggatgcttagcagggattggggtctttagtagggggttgggaagagaagaaatgtgtttcggggaaaccaggagattggagccaggaggttcctggctaagtgatctagagtagccactgcatctctctggatctcagtttctccatcagtacaatgagggatgaatgccctttcatttgtgactggcagaatgataggagtggggatgggggcagagattgtgttgtgggtgctgagtttcccgagagagcatcttgcttatagttcagagccagtgatggtggctgcagcagccgagccttggagggagggttggtaggaagacttggttgaacctgggccctgccactaagttagtgggtgttgtcccctcctggggccacactttctccatctgtctaatgggactagatgctcctagacccaggagtcagtgactgcacctggcatcagagactggggcagaggcctgcagctggcccaggtgagggtcacggtctcattgtgcagagccaggagtggttgtcaaaggtagtgtagaaaaccaagagtcaggtgggagtgctgaaggaacctccaacttttttggtttatagatggggaaacaggctggatgtggggagaccagttgtcgagggtcccagaatgggttgcggacagagacaggatgaaaactgggactactgaccatctattccagcttctcctcacaggaagctctgatagaaggtacagggagtagccttgtctggggagtggggagatggcccctccacatcccttcgaggtgcggaaacagataacacaatgggagctcagccggcttgtgttccctttccttttttctctctgcttgtcctgcactctgctcaggacttgttaatctcagaagtctccagttaaccatcccatcttttccacaaggacaggataggggtgcagtcggacaggagcagcagaaaagggggttgggattttgcagtgacaaagaggtccaggtgtaggcgcatgagattgggctaggatgtgcagggaggaactgagcacagagctttcccctgtgtctggggttggggtgaggtaaggtttctctaataatttctggaaccccttcagagaccatggttttctggttctcaagtccagaagagacatcccagatatgcacatacccaggcacatccacacagacaacttcaccatccacactcccagacacatccacacagatgacatcacccacacccccaggcccatccacacagatgacctcaccatccacaacccaagacatatccacacagatgacctcacccacacccctaggcacaaccacacagacgacctcacccacacccccagacacatccacacagatgaccacaccatcgacacccccagacacatctacacagatgaccacaccatcgacacccccagacacatccacacagaggacctcaccatccacacccagacacatccacacagacgacctcaccatccacacccccagacacatccacacagaggacctcaccatccacacccagacacatccccacggacgacctcacccacacccccagacacttccacacagatgacatcacccacacccccaggcccatccacacagatgacctcaccatccacacccccagacacatccacacagacgacctcacccacacccccaggcacaaccacacagacgacctcacccacacccccagacacatccacacagatgaccacaccatcgacacccccagacacatccacacagatgaccacaccatcgacacccccagacacatccacacagatgaccacaccatcgatacccccagacacatccacacagatgacctcaccatccacactcagacatatccccacagaggacctcaccatccacacgcagacacatccccacagacctcactatccacacccagacacatccacacagacgacctcaccatccacacccagacacatccccacagaggacctcaccatccacacccagacacatccccacagaggacctcaccatccacacccagacacgtccccacagaggacctcaccatccacacccagacacatccacacagacgacctcaccatccacacccagacacatccccacggatgacctcaccatccacacccagacacatccccacggatgacctcaccatccacacccccagacacatccacacagatgacctcacccacaccccgagacacatccacacggacgacctcacccacatccccagacacgtccacacagacgacctcatccacacccccagacacatccatgcagatgatctcacccacacatccagacacatccacatggacgacctcacccacatatcctcaccacatacgtggcatcagagactagggcagaggcctgcagctggcccatggtggaccatacacacacagcccctacacagaaggctacaaaattggcaggatccagtgcaaagtgaaaatgtgagcccctgttcaacaattattaagaatttcaagataaggcccacacctataatcccagcactttgggaggccaaggtaggtggatcacttgaggtcaggagttcaagaccagcctggccaacatggagaaaccctgtctctactaaaattatacagattagccgggcatagcggtgcacgtgtaatcgtagctactcaggaggctgaggcaggagaatcgcttgaacccgggaggcggagcttgcagtgaaccgagatcacgccactgcactccagcctgggctacagagcaagattccctctcaaaaaaaaaaaaaagaaaaaaaaagaatttcaagatgatgacagcagatcattaaaccaagagcagggcccttctgagggctctgtttgaccgcacaggttggtttcacaccaatgatgctagctagctctgctcctaacacattccagccattcccttggagactcacagtcccacagacaccatcctgctagagagacacactcatccagggacaaacattcacacccctagacccatcaccactgagggcacacccacctctccaccccagacacatacagtcacatcagccccagtatcacagagcctcacctacagccagagttcctcccagctgggtgggtccaggcatcccaccagggcacagggccattacactcacccctctctcgggctgccagggtctcctccaccctcttgctccacacagtccctcccccaaatgcacactagcctacctgctgggctggccatggaggatagaggagagggcaatgccagctcttccacccactccgcagccagcctgcagggacccagctggggataagatgccaataataatacctggctgggcgcggtggctcacgcctgtaatcccaacactttgggaggccgaggtgggcggatcacctgaggtcgggaatttgagaccagcctgatcaacatggtgaaaccccgtctctactgaaaacacaaaaattagctgggagtggtggtgcatgcctgtaatcccagctactcaggaggctgaggcaggagaatcgcttgaactcgggaggcagggaggttgcagtgagccgaaatcgagccattgcactccagcttgggcaataagagcgaaactccgtctcaaaaacaaaaacaaaaacaaaaacaaaaaaacaaaaaacctaacacttgttgaacatttacctgtgccaggcactgttccaacactttataaatactaactcatttaatcccacaaccctatgaagtagataattttttttgttttttgttttttgtttttgaggcagagttttgctcttgttgcccaggctggagtgcagtggcgcgatcttggctcactgcaacctctgcctctcaggttcaagcgattctcctgcctcagcctccagaatagctggaattacaggcacccgccaccacacccaggtaattttttgtatttttagtagagacagggtttcactatgttggccaggctggtctcgaactcctgacctcaggcgatccaccctcctcggcttcccaaagtgctgggattacaggcgtgaaccatcgcgcccggccctgaagtaggtaatatttttttatccccattttataggtaaggaagctgagacacagaaaagttaagtcacttgagcaagatcacagctagtaggagaggaagccggaattttaacctgctgtagacagcatggtctgtcagttgttgatgtgactgtactgggcatgccaggcactgtgaacccagtggttccagggtctgcccctgaggagctcaggtcctctgtgaaatgatgaaaaaaggtgattatgatgcagcgtctttttgactggggtccgtggtcagtcccaggagtccccaggatggtcacttggctggtggaacagatgattttctttcactacagtcacaatatttggaagatgtctgcatgagagatagtcctttttacctttttacagacaaaattgtcaaatatgtaataaaggcattttcactgatagcatacactgtcagataatggacagtccacacggcagctggttacccagcctagatagagggctttctcaatggtgagaatgcaaggaaacctgctctgccggtgtgtgttctgggcacgcagcgggcctcatttatgacttagttcaacattacaaaccttcgggagccccaccctccttctctgagagttgccgctccctactaggtatggcccctgaggccatgtttgtatgctttgactcctgcccctccagcttcccggaggggataccccaaaatgaaggcctcagaagcaactgagactgactgatccaggaatgcctatctgatccaagtaggccaatcaggtcctttgtctggggcttgggaatctgcattccactggctgggactggcccctgaactgagaacaggtaatcttgggaactgtaaagcagccaccttcacattcactgcggtttacacagaagaaaagaagcagaaagctctctacaggagtagagaagaatgaggcagtgaagagggggaaagtgctgagctccagaagccatccagctccacaaggggccacaattgctcccccaatccttatgataacgcctgatttttctttccgttagcctgagacagtttctgttccttgtagtcaaagggccttatttaaggcacttgaattagaaaacatcaaagagaagagagtgccgcaaatctcctaaatgtgttggttttatggtcatttttgaatatgacagactccaaagccgtggagcttacatgtgtcctggagtatccccagtggaagcttgaggttgtttgtctctgtgtacatcccctagtggagtggagatggctttcctgataagaaatgtgctttgaaaggactttattaagcttggaattgcccagtggtttgctggacaataaatatttgaaaactagtttctcaaaaatccaaatgtataggttatatatggacatatatttattataaattttactgatataaaggctgtgtaggccaggcacagtggctcgtgcctgtaatcctagccctttgggaggccaatgcgggcagatggcttgaggtcaggagttcgagaccagctggccaacatgataaaacccagtctctactaaaaaaacaaaaattagctgggcattatggcacacacctgtaatcccagctactcaggaggctgaggcaggagaatctcttgaacccgggagatggagattgcaatgagctgagatcgtgccactgcattccagcctgggtgacagagtgagaccctgtctcaaaaaaataaataaaggctgtgtagcacacagcttaacttacaaatgacacaatatgcaaactcctttttttttttttttttgagacagggtctcaccctgtcacccaggctggtatgcagtagggcgatcatggctcactgcagccttgaactcctgggctcaagtgatcctcctgcctcagcctcttgagtgctgggactataggctcgtaccatgacacccagatcatttaaacagtttttttgtttgtttgttttgttttgttttgttttttagacaaggtcttgctatgttgcccaggctgtcctcaaactcctaaccccaagcaaacctctcacatgggtctccaaagcactagcattatggatgggaggcaccatgctggtccatatacaaacacttgatagtaaattccatacagccaattgattctggcagaatggtttcattaatttttgccaaactcatatctgtagccatcctatggttgcaattcaaccaaaatttgaaattgaattgcatagataccaatctgctaattattttcctaataaatttattgtcattaaatgtgctacaggatctactgttaaaatatttttctttttttttttgagacggagtctcgctctgtcacccaggcggcaatggcttgatctcggctcactgcaacctccacctcccgggttcaagtgattctcatgcctcagcctcccgagtagctgggattataggcgtgcatcaccacccccagctaattttttttgtatttttagtagagacagggtttcaccatcttggctaggctgctctcgaactcctgacctcaagtgatctacccgccttgtcctcccaaaatgctgggattacaggcgtgagccactgcacccaacctactgttataatatttttcacccttctacagatatattcattaaacagaaacttctttcagctttagcaccagacttgacaaactattaagtttaatttgcacttttaacattttgtctatcactttctttagtcttgaaagtcaacaaaacaacaaatcagttccttatttgtacctatcaggactcagacaacaataccccaaaatgaaggcctcagaagcaaaagtttttctttgaccttctcctgtcctcttgtctttctgttccattctcccctgaggctagccatagaaactagaatctctcttccccaaggctagcatcccttttccccaagacatttcacggaaaacaaaccccttttcccccgaagccagccgtaaaacctaaaagcattactctggattttcctccacctttctgtgtgaaaagaagttatcttacctaccttgactctaggtcataagatcctcattctagagtgggtcctgccccatattcagaaggaaggaatgaatgctcagagaggccaggaagaatccaggcagaagtccttgctgggcttcctcactcagtctattagcatttgatcatagccttttcatccagtcatatttctacatggctgtccatactttgttgaacctaagcataaaaacgaatagttttctgtttttcttcaggtcttcatgctgaaggctcccatgtacatgttaataataacttttgtatgctttgtctccaattttctgccttttgtgagttgatttttccatgaaccttcagagggcaaaagggaaaattttccctggcccccatatgctgtttaccaatttctgtggtgtaaatacccccactcggctgattcaagctgctgccacgatgttatggagccaagagttaggaagagatgtgcagaagcacatcattatgtcataattccactacacagataacaacagatgtagggctgggtgcgggggctcacgcctgtaatcccagcactttaggaggccgaggtgggtggatcacttgaggtcaggagttcgacaccagcctggccaacatggtgaaaccctgtctctactaaaattacaaaaattagcccagcatggtggtgtgcgcctgtaatcccagctactcgggaggctgaggtaggggaattgcttgaacctgggaggcagaggttgtagtgagctgagatggtgccagtcagctccatgtagtgagctgagatggtgccactcaggcaatagcaagactctgtctcaaaaataaataaataaataaaaatgaaaaaaaaataaatgtaggtaaactcaagagaatagataatagtgaaatatagtaaaataattaggaagtgatgatttttaatatctttgttttaatataatttatttaattgtaaatgtatacaatttaattttaaaatttttattatgatgatatatattttttggggacagggtctcactctgtcatccaggctggagtgcagtggcatgatcacagctcactgcagccttgacctcctgggctcaagcaatcctcccacctcagcctcctgagtagctgagaatataggcatgcgccaccgcaccccgttaatgtttaaaattttttgtagagacagggtctcactatgttgcccagcctgatattatgattttttaagagatggaagtctcactattttgcccaggctgatctggaactcctggcctcaagtgatcctcctctcacctcagcctcccaaagtgctgggattactggtgtgagctgctgtgcccagtatacaatttaatttttagcaatgactgttaaacagccctcttgcaaaatgcctgaaactttagcaatttgctcttgctagctggtgtgagcggctcttatacactgatggacttgtccccagccaaaggcatcccacagggcattgtcaacaaaagaggccccatgatataatatttataattataaatattaatactttttgacccagtcaaaatcatctcccagacctcaagaaactcttcttggggtcacttgcacctcctcttaattctcctaaacacattgttgccatttagactactgaatgtcagagccagaagggtcctgaggccatttggtgccttcaacttgtgaagatggggaaactgaggcccagggtagggcagggacttgcttaagctcattaacattgaaaaccaagtcttatggctcccaggtcaggactcatcctattaactcctttcttagggatagggaagctggcccagagagaggaaggtgagtgcaaattcacacagcaaacaagcgtcagagccagagcctggggattctcctcgcccgcccagatctcctcggaaccttcaccttcctcttgggccctggaaatgaggcatgtgcgcgcctcctccgtgcacccagggccaggcgttgaagacggaaggggcgattcctgcgggtgttcttctcggagctgaggttggcacgcaccagtttgtccaccggggggcactacggagccgagctaggagagcgcgcgggctcccggagcctcccagccctgattgatccgcacttgagcccggcgggaaaacaggtgtcccgagaggagaggaactagccagacgtcaccctgagaactagagacagagctggcacttgacgcggacctcctgacaccagtcaggtgcactctcccggcgtctaagcgcgtccctccccctcttccgggggccgggctgctacttcttttcctgtcaactggggtcagcgaaggccctcctgggccaggctgtgcagaaccacagctctgtctggcatggcattgcacctccactggacagtggccggtgctgagcgacacatgcctcattccctctctgtccagggccgctccccaccccgccttcttcttcttcttcttctttttttttttggaaacggagtcttgctctgtcacccaggctggagtgcagtggcgcgacctcggctcactgcaatctctgcctcctgggtccaagccattctcctgcctcagcctcccaagagtacctgggattacaggcgcccgccaccacacccagctaatttttgtatttttagtagagacggggtttcaccatgttggccaggctggtcttgaactcctgaccttgggtgatccgcccatctcggcctcccaaagtgctgggattacaggcgtgagccaccgcgcccgccccgccttctgtcatcccgtatcagcgcaagtctttgccgtttaccaaacattgtcacaccctctgattaccttctttttctgagtagagaggaagggtggcgggggctggggttagacctgagcttcagtcttggaccagctactcaaactcacctcgttacacaatcactttgtgccttggtttccttattttaaagcagagatcatagttcttatctcacagggttgttgagaggattaaaagaggtaacacagcaagtccttgggaacttttctttttgagacagggtcttgctttgtatcccaggctgaagtgcaataccgcgatcgtggctcactgcagcctccacttcctggcctcaagcaatcctcctgcctcagcctccatgtagctgggaccacatgcggctccaccatggctaattttttattgttttgtagaggcagggttttactttgttgcccaggctggtctccaactcctgggctcaagcgatcctcccatctcttcctcccgaagtgctgggattacaggtgtaagccacctcacctggcccttgggaactttttatcatgattgaaacctgcacaagcatcgtaggagagatggaactgccttcaccttacactggcagaactgaggctctgagaggctctcagtgaggagtcataagggaactttttatttgagcgccaggtgtgattgacttaggggtataagaagtagaactttctttctcttcaatccggagctgtgtctaagctgggatgggagataaatgtacgtgcagctaaggcttggtaggtccatgtgtgtgtgttcccaggcatgttttctacatggatcaccttgcaacacccattgtcctttttgctctgagtggcccttctggggctgacatctctctctctctgcttcttctgggcattactagaaaggcaagaattgttctgcggagttgggttcacagtgcggctcggggtcatttggtcactgggctctggccaccatctgcagagccagaggtgtctctgcagttaccattcactccatctttcctcccctgccagcctcggaagcctgttgtctgcctaaccaacaatctgcttgaattgggagagagagaatagcaaaagggaaaatacccagagagaaacaaatgaatcaatgatttagatacctatttctggagtgccttttatgtagcactgttttaggccctggggtaacagctctgtgcaggctgacacagtctcttctcccaaagtgacctccagggggcagacagtgattgtcataatgcttaatatgcatggagccctactatgtgcagggccctgtgtcaactcatttactacttccgacagtgtaatgatataaatgcttctgttatcttcattgtataggcgaggaaacagaggcacagggaggctctgtatcttgcccaagctagtagctaatggaggtaggattccaattcagacagtctgaaaattaagcaaggccatggggtgcagaagggttgacttcctcagggaggaagtggtcttctagctgagacctgcctaatgagaagcagctgtgcctagatctgggggatgagtgttgcaagcagtaagattactacagcaagtgcaaaggctgagacaagaatgaacttgatgtggtcaagagctggaaaggaagcctctatgactaggagggcaggaatgaagaggagagaatggaaggaggtgaggggaagggtggatggacccaggttggcaatataaaaccctttaaggggtttgcagccattgggcttcttcccttgctcgggcaaggccaagccctatgcccataaaccccaaaaggtcattatctttctgtctccatgggtggctagggcatccattgaggggctgcccctaatctcccactggtcccactggtcctgggagcctgatgaccatccactttctggaatgttggggaggatgccaagggagggcctagggcccagagaaaccctttaaactaaatgcggggtgggcaggaggtgttgacccgtgagtcagaggccaggtagtgcaaaggcactttaattggggtcattaagatcaccaagctttgatgccccaaccctgagtcaagccgtcccgttgacccccctcaacttcctggcctcactgcttgctacccccagtgacaggagaagtccctttgagggcactaattagaacttcctcttctagattccagggctttctccctgactggggtcagggaaacagctccttccagagatcagccatggccccacccctcccacttcctccagattcaggagtttccactgaggctggtacaaccacaatcccagggcctcccagccctgcccacagtgaattcttgcccatgggggtcattccctctacttggaatgcctttttgacttttgtttacattgataattccatctaccttactcttcaaggaataacagactccttcctttaattcatgccatcattctttctttgttttcatccattcattcatttcattcataaaatttaggcattcatttggttcctgccaggcactggggatacaagagggggtgggactgaccctgaggtcaaggggtgtctcatcatctgtgggaagcacaaggtaaaccagcaggacctgctacatatttggcaggtcccagtgcagatgaaaatgcagagccccttgtccaaaatgtactatgaatttcaaaacagcgacagcagagcatcaaaccagtctaggggcccttcttaaccgtagggtccctctgcagaggtcatacacccatacaagctggccatacaagctggccctgtaagcaagtgatttcatgagagatgtgtgatggaggtgagcctgaaagtcatcagagaggaggtgatgtctgtaactgccagagccaggaggagagaagccacatggctgtttctagaaactgcaagttgtccaaacaaaagggccaggagcagctggagtcaggctatgtggggctttgtggaccagttagggagctgggtctttattcccaggcagtagggaagcattattagatttttttaaaaatctaataatttttaaccaagagcattattagatttcttttaaaaaatttatttatttatttatttatttatttatttattttttgagacagagttcccctctgttgcccagactggagtggagtggcgcgatttaggctcactgcaacctccaccttcagggttcaagcagttcttctgcctcagcctcccgagtagctgggactacaggcgtgtgccaccatgcccggctaatttttgtatttttagtagagatggggtttcaccatgaaaccagccaggctggtttcaaacttctgacctcaagtgatccactctcctcggcctcccagagtgctgggagtacacatgtgagccgctgcgcccggccagattttttttaaaaatatcattctggcaccagatatgaaatacaaataataaacatatgaaaaatacaaataataatatatatgaataatacaacaaatacaatggaaagaagttcaacttcattagcaattaaaaaaaattaaagattaacgtggcaaaaagaaaaaaaagaacaacgtaggcaaggccaggtgccatggctcacgcctgtaattccagcactctgggaggccaaggtgggtggatcacttgaggtcaggagtttgagaccagcctgttcaacatggtgaaactctgtctctaccaaaaatataaaaattagctgggcacggtggtgtgtgcctgtaatcccagctactcggcaggccgaggcaggagaatcacttgaacctgggaggcggaggttgcagtgagctgagatcatgccactgcactccagcctggagaacaagagagagactttgtctcaaaagaaaaaaaaaagaacaatgtaggcaaaatggtgaaaagaaaactttcccactagcagtgggtctatcaatgagtgcaaatttctggtggcaatttgtttggaaacctcaaaaatgtgcaccctaagatgttttgggaaggatacttaagaaactggtgccagtggttgtttctggggaggggacctgagggcaggggaagaaagaaactttacttttctctgtacaccctttgaaattttgtgccacgtgtttacattttcaatgtgtatcccttaaccaaattgttccatccctatgcatttttcctaaggaaaaaaaataatagaggtgcacaaatctgtacaaggctggttatcacagtgtcatttataatatcacaacattacaaatgactttaatccacatgctacaggctggcacccttgccctcagaggtactgagttgtgtgttagggtgctctaagcaatatggtagacatggtgcacattcaaagggggttggttttacttgatagcgactaatttagaacaaaaactttatattaaaaccaatatagcaggtcacaccactaggatgactaaaatcaaaaagacagatgatgacaagtatagctaaggatgtggagaaattgaagccctcttacattgctagtaagaagtaaaatggtgtggtcactttggaaaaccgtttggcagttcctcaaaaagttaaacattgagctaccatatgacccagtaattcaactccaaggtatatacccaagagaaatgaaaacatatgttcatataaaaacttgcatatgagtgttcatagcagcattattcataagagtcaaaaagtggaagcaacctaaacgtctaacaattgatgagtggataaacaaagtatggtttatatttgtacaatggaatcttgtctgggaagtaaaaagaatgaggcactgatacagtgatacctgctacaacatggatgagccttgaaaacattatattaagtgaaagaagacagtcataaaagaaatggctagaataggcaaatccgtagagacaggaagtagatgagtggttgctgggacctaggagaagtgtgaatgaggggtgactgctaaacgagcatggggtttccttctagggtgatgaaaatgttctggaattagtggtggtgattgcacaaccttgtgaatgtactaaaaaccactgaatggtttcttaacataggcggattttatggtatgtgaaatatatttcaataaaggtggttttttttaaatggatatgatatggcatagaattagggtgaccaattgttctagtttgcccagtacaaaaagttttcccagaggctgggcgcaatggctcatgcatgtaatcccagcattttgggatgccgaggcggccggatcacctgaggtcaggggttcaagaccgacatggcaaaaccccatctctactaaaaatacaaaattagccgggcatggtggtgcatgcctgcagtcccagctacttgggaggctgaggcaggagaatcacctgaacctgggaggcagaggccaacatggtgaaatcctgtctctactaaaaatacaaaattagctgggtgtagtggtgcatgcctgcagtcccagctactcaggaggctgaggcaggagaatcacctgaacctgggaggnnnnnnnnnnnnnnnnnnnnnnnnnnnnnnnnnnnnnnnnnnnnnnnnnnnnnnnnnnnnnnnnnnnnnnnnnnnnnnnnnnnnnnnnnnnnnnnnnnnngcaacaagaatgaaactttgtttcaaaaaaaaagtttttccaggacatgagactttcagtacgcaaaccagaaaggtcccaggcaaagcaggatgagttggccagcccacatagaatgcagactttacattcatattaataataacatataagactttaaagggattttctgcttgcagttcactagtgctactgcagagggaacgtttaagaagcactgacttcaatgtccaaccacaggaagtagtttcattggttcattcattcatttactccccattagagtgcaagctctatgaaagcaagggcttttgtctgtttgattcactgctgtcctcccagggcctagaattgtgcctggcacctcagatgttctgtagatgtttgttgagggggactgtgtgctggaagccagcaatacattgttctcttttgccccatcctgagtggtcccagaagtctggctgagaagatggcttctgggtggaggacatccactgacagcgagtatggggccatctcagtgctgttaagaaaatattttaatggcaaggaaaaatgctcatgatggaatgttatgtgaaaaagatgggacacaaaattatgtaggtagtgtgagtccagattgtttaacagtgtttaagtggtcagccatggtggctctcacctgtaatcccggcatgttaggaggccgaggtgggtggatcacttgaggtcaggagttcaacaccagcctttccaacatggtgaaacccctgtctctactaaaaatacaaaaagtagcttgaggtggtggtgcatgcctgtaatcccagctactcaggcggctgaggcaggagaatcgcttgaaccccgggaggcggaggttgcagtgagcctagatcacatcactgtactctggcctgggtgacagagcaagattctgtctcaaaaattttttttaattaattttaaaaaagcgtttaagcattagaatagatgagaatgggacataaagtatgtcgaaggtgggaatccattggtgaattcttttgaatttttaaattcttcttttttttttttttttttttttttgagatgcagtctcgctttgttgcccaggctggagtgcaatggcatgatctcagatcactgcaacctccgcctcctgggttcaagtgattctctcacctcagcttcccaaggagctgggattataggtgtgcgccaccatgcccggctaatttttccatttttagtagaggcagggtttcaccatgttggccaggctggtctggaactcctgacctcaagtgattcacccacctcagcctcccaaactgctgggattacaggcatgagccaccgcacctggcctaaaattcatttttcattttttattcagcctctgcgatgccctgccagatgtaactctgggagttgagatcctgtggtgaaccaggcagataagatccctgctatcgtgggacaggtaggattttataattggagggaatgaaacccagagtaaaggagcaaagttattttttttaaagactgatgaaattccggatgtgctgaagaaccagctggaagcttgtagttagggggctgttccagcagtagggcagactcgggagtgggggtgagggcttgtttagaaagaagcaggaagccagagaatgcctctcaacccacacccattgtgtgtactctggtaagtcccttcttcggtcttggcctcagtttctccatctgttaactgagagaaggcactagatgtgtgtgtttatctctctattattcaaatcagagaacttaaaaaatttaattgacaaatacaaatttatacatttatagtgtgcaatataatgttttgaaatatgtatatattggccaggcacggcggtgcatgcctgtaatcccagcactttgtgaggctgaggtgggcagatcacataagcccaggagttcgagaccagcatgggcaacatgatgcgaccctctgtctacaaaaaatacaaaaattatctggatgtggtgttgcacacctgtagtcccagctactcgggaggctgaggtgggaggatggcttgagcccgggaggtggaggttgaagtgagctgggatcacaccactgcactctagcctgggtgacagagtaagaccctgtcaaaaaataaaaaataaataaataaataaatatgtatacattgtggaatggctaattgggctaagtatgcattacctcacatactaatttttttgcaatgagaacagttaaaatttacttagcgattttgaagtatacaatacattgttaataactatagtgactgtgttgtacaataaatctcttgaatttattcctcctgtctaactgaaattttgtatccgttgaccaacatctcctcaatcccttctcctgggcctggccccagcccctgttaaccactgttgtgctctctgcttctatgagtccgacttaaaatttcacataagtgagatcatgcagtgttaatctttctgtgcctggcttacttcagttaacgtaatgttctctaggttcatctacgttgttgcaaatgacaggatgtccttctttttaaaggctgtatagtattctattgtgtatatatcacaatttttttgtgttgttgtttgtttgagatagagttttgctcttgttccccaggctagagtgcaatggtgcagtcttggctcactgcaacctccacttcccagattaaagcagtccttctgtctcagcctcctgagtagctgggattacaggcatgagccactgtacccggcccatcttgtgttttttaataactctccattctgctctcttcccagcccctggcaactaccattgtactttctgtctctacaaattagagtactctgggtaccttgtgtaagtgaaatcatacagtttttgtccttttgtgtctggcttatttacttagcataacatcctcaaagttcagccatgttgnnnnnnnnnnnnnnnnnnnnnnnnnnnnnnnnnnnnnnnnnnnnnnnnnnnnnnnnnnnnnnnnnnnnnnnnnnnnnnnnnnnnnnnnnnnnnnnnnnnntttgtagaaatggaggcctcgccatgttgtccaggctggtcttgaactcctgggctcaagcagtcctcttgcctcagcctcccaaagtgctggggttacaggcatgagccactgcacccagccaacacttgtctttcatctttttttgttgttgttgagacggagtttcactcttgttgcccaggctggagtgcaatggcgagatctcaattcactgcaacctctgcctctcgggttcaagcaattctcctgcctcagcctcctgagtagctgggattacaggcatgagccactgtacccggcccatcttgtgttttttaataactctccattctgctctcttcccagcccctggcaactaccattgtactttctgtctctacaaattagagtactctgggtaccttgtgtaagtgaaatcatacagtttttgtccttttgtgtctggcttatttacttagcataacatcctcaaagttcagccatgttgcagcatgtgtcagaatttcttgtctttttaaggctgaatggtattgtattgtatatatatacatgagatggctttagagctttcttcaactttgaggttgtaggagtctcaatgccaggtctccgttgttcctcagtgtggactgctgcctgtagggtgagtggaggccctggcttcagaaagactttccttcctgcttatgtcaccagaaccttccctgagcccagaggtcctgggagaccctggggagggatccgaggaatgaaaggctttggctaaacacctgctgccttctctctgaggcttcagcagctgggtcagggttgggtgctgagcaagggtgggggagttaatgatggcctgccagggacttggttgtccagatgaaacgggccttgctctgaggcctggcctgattacagggagccctgcgcttgccctccccagggcccaggcctggccttgcagcagcccctgcatgcccagctgttctggagcagctgcagaggtaggtggagctgaggaatttgggatagcagctgccaaaatgcactggctttgggatctggcacaagagatacaactcatggtgaagccagcaagttcatgccggttctcatctgagggctaactagtagtaacagtcactgttgcttcaagttttaatatgttcaccgcataccaaacactgggcatgaattatctcagttaattgtcacacagctgtaggaggttggtatcgttgcccccattttacagatgagcaagctgaggcttggagagccttgcctaggtctatgcagttggtaaatggcccagctggaattgggccctggttatgtgctgaaggctggtttcttgtccactgcttctgtgactcggtgggacattctttggccagcttcttagtggagagtgggtgaggggccaagatccacctgccttccccacatgggccaggagagctcctcttgtagctacttagggattctgcttcaaaacattatttgaaagccactgttaatagttcaacctatttattttaatttatgtattttttttttttttgagatagggtctcactgtatgcccaggctggagtgcagtggtgcaatcttggctcactgcaacctttactccccaggctcaagtgatcctcccacctcagcctcccgagtagccgagaccacaggtgtgcaccaccatgcctggctatttgtatttttagtagagatgggggtcttgccatgttgcccaggctggtgtcgaactcctgagctcaagcgatctgcctacctaggcctcccaaagtgctgggatttcaggtgagagccactgctcctggcctcaacccatttattttacagatagagaaacaggcccagaaaggggcagagagctgtctagggtcattctaacagggttggtggctgagccaggccctgcctctcagccacctgctgtttctggtgcccacctgtcttcctggattttgtatgtgacctccctaggcaggagggcactctggggcctcccctgctgggtctgctgggcctggagcccattctgtaggacccctgcaggccttggctggtggacaaatgactgaaggagggagatgcagggctggcaggcagtaggggcagagattagaacccaggctggatctcaggctggctctgggctgacttgttgtgtggcctgagtggctgcattctctccaggcctccatttctccatctgtccaacgatggggtattgaccacttgggcccacaggcactgagcaggggaggatgaatggtcccgacaggagatataaatgtatggggaggaagaaaggagccgctgggcccaggagggctgtggacatcctgcctttgccccatcctcctccaggaaacagcctcccacactctcgctgctggccggatgacgccgcttggcctgagcgtgtccaagcctcaggtgacagagttcctggtcccttatgctgccctggggctggtggctgcccttcctcgatcctaagacatcctcctcacctcagagtggtgctggcctcagcggggcttggaggaggctgagctctctgtgtgggcactcacatgggtgtcagcctgacccacccacgtgtgctcacatccctgacacgtgcacatacatgcaaacccatacacgcaccctgcatagtaggggctcacagacggaaagagccaggccacttcttttttttttttttgagacggagtttcgttcttgttgcccaggctggagtgcaatggtctgatctcagctcactgcaacctccacctcccgggttcaagcgattctcctgcctcggcctcccaagtagctgggattacaggcatgcgccaccatacccggctaattttgtattttttagtagaggtggggtttctccatgttggtcaggctggtctcaaactcccgacctcaggtgatccgcccgccttggcctcccaaagtgttgggattacaggcgcgagccaccgcgcccggctgagccagaccacttctgtcttttaaggctcctgctaatttaaaaatgaagaaagtcctaaataggatgttcacaactgtggtatgtttttatttaacaaattaatgttttttaacacacacatgcacccacacacatccaatgcagtgcaactgagagactcacaagatcgtcacaagaattataaaaaatgtgatttcacattgctgtgtggtccagtgatgggatgtaagtttcaaatggcatgaagagcattctgttcttcccatctcatccataattctctggggctagacatccagcccactttgtgtactcgttgtattatgaaaagtatcaagcatccagaagggttgaaagaatggtacagtgagcacccacatactcagcacctggggactacaatgaacattttgcagtatctgctttatcacatatccattcctctgtccaaccctctgtccatctctctgcacagacagccctctgcctatccatctacctagccatccatccctccctccctcccttcattccatctcatttttggatgcatttttgagacttctgaatgtgaggcctgggccaaatggcactctcttctctcctttgcagtaacaggccctgccacacacacaagcatacccccacctctacatgtaaaccccacctgcgtacacaccatatatgacttacccatgtccccacatttatacatgcacattccatgcacatattcacataaccacacacgctcatctgtgcacatatacctaaacacccccccctccccaacacacacaaactgcccacatatacactcacagaagaccctggacatctgtaaggaaagcatctggagacctttgggaatcctcagacctgtgactgtcgtggagccggtgccaggtcctggctgtctcctccatacatttctggcaagtgccagaggctcccttgagctacctacctcagatgtcctaccttttccactcttacccatcttctctctcaacccctagtcacttcctacaaaggaaacggattccttccagagtgttactgttatgggaagcaaatcccacagaccatccactccatgcaggctgggactgtgtctgccctatccacactgcattcccagctcctggccccctgtggctaagtgttgattggaaaaaagtcaccagagcagcacagaggcacatacactgggcagccacaggggtacctccaccccacacagttacgtccatgcacacagaacaccctgtgtgtgtgtgcatgctcaagcttgcatcactgtgtgcctgcacacatatgaacacgcatcgtgtctgcctgtctccatactttccagatagagtcccttccaggacctgggtcctttcacaaaatcacctaataccactgtgggctcatctgctgacatgtgagatccagatgtggccccatgactgctcagggctcctggcttggccctgaacatctgggcgcaggggtttagagcaccagctttggaattgcattctcctgagaaaacctgggttccaccctggctctgcacatgatcactgtgcatgttccccgtatgatttatgtacaagttacctaacttcttggagcatcaatttccttatttgctaaatgggggcaatagttcctaccttaaattcatcttaaaggagataatctcagcagagtgcctggcatgttgtaagctcttaaaaatgcttgctatgaatatgattattgttactttagcctttgctctgaaatcccatgcacgctttgtgaggaaggacagccttggttggggggtgtttatggggagagcagagtggatggtgcgtatgtgaatacctctccccagatgctcccccaatcccaagctctcattatcttatatgcatattcataagggatggccctgctctgtaaatgggtcagaagcaggaaatagaggccagtacagacagcgaagcccaagggataggagggctcaaagccggcacacatctgagtcctcatggacgggaggatggtaagaggggatggggagagaatggattgggggcactgaggcgggggcaggagttcgttcctatgttgcagatttgaaaactcaggcccagtgagatcagattagagaaccttggggtgggtggtccaagaagtcagagtctgcttcctttgggaactggagttgagcatctgtctgggctgggtgatgggcacagggcaatggaccaaatgacccctacatgtttatttcaagggacatggtttacatagcattgggtggagaagctgaatcctgaattc

SEQ ID NO: 36 - DNA, 2913 bp, Homo sapiens
gtcccagctagagctccagcgcccgctcaggccccactcgaccctctcgggcctcggctacttggactgcggcggaatatggcggctccgatgactcccgcggctcggcccgaggactacgaggcggcgctcaatgccgccctggctgacgtgcccgaactggccagactcctggagatcgacccgtacttgaagccctacgccgtggacttccagcgcaggtataagcagtttagccaaattttgaagaacattggagaaaatgaaggtggtattgataagttttccagaggctatgaatcatttggcgtccacagatgtgctgatggtggtttatactccaaagaatgggccccgggagcagaaggagtttttcttactggagattttaatggttggaatccattttcgtacccatacaaaaaactggattatggaaaatgggagctgtatatcccaccaaagcagaataaatctgtactcgtgcctcatggatccaaattaaaggtagttattactagtaaaagcggagagatcttgtatcgtatttcaccgtgggcaaagtatgtggttcgtgaaggtgataatgtgaattatgattggatacactgggatccagaacactcatatgagtttaagcattccagaccaaagaagccacggagtctaagaatttatgaatctcatgtgggaatttcttcccatgaaggaaaagtagcttcttataaacattttacatgcaatgtactaccaagaatcaaaggccttggatacaactgcattcagttgatggcaatcatggagcatgcttactatgccagctttggttaccaaatcacaagcttctttgcagcttccagccgttatggaacacctgaagagctacaagaactggtagacacagctcattccatgggtatcatagtcctcttagatgtggtacacagccatgcttcaaaaaattcagcagatggattgaatatgtttgatgggacagattcctgttattttcattctggacctagagggactcatgatctttgggatagcagattgtttgcctactccagctgggaagttttaagattccttctgtcaaacataagatggtggttggaagaatatcgctttgatggatttcgttttgatggtgttacgtccatgctttatcatcaccatggagtgggtcaaggtttctcaggtgattacagtgaatatttcggactacaagtagatgaagatgccttgacttacctcatgttggcaaatcatttggttcacacgctgtgtcccgattctataacaatagctgaggatgtatcaggaatgccagctctgtgctctccaatttcccagggagggggtggttttgactatcgactagccatggcaattccagataagtggattcagctacttaaagagtttaaagatgaagactggaacatgggcgatatagtatacacgctcacaaacaggcgctaccttgaaaagtgcattgcttatgcagagagccatgatcaggcattggttggggataagtcgctggcattttggttgatggatgccgaaatgtatacaaacatgagtgtcctgactccttttactccagttattgatcgtggaatacagcttcataaaatgattcgactcattacgcatgggcttggtggagaaggctatctcaatttcatgggtaatgaatttgggcatcctgaatggttagacttcccaagaaaaggaaataatgagagttaccattatgccaggcggcagtttcatttaactgacgacgaccttcttcgctacaagttcctaaataattttgacagggatatgaatagattggaagaaagatatggttggcttgcagctccacaggcctacgtgagtgaaaaacatgaaggcaataagatcattgcttttgaaagagcaggtcttcttttcattttcaacttccatccaagcaagagctacactgactaccgagttggaacagcattgccagggaaattcaaaattgtgctagattcagatgcagcggaatatggagggcatcagagactggaccacagcactgactttttttctgaggcttttgaacataatgggcgtccctattctcttttggtgtacattccaagcagagtggccctcatccttcagaatgtggatctgccgaattgaagaggcctgatttcagctccaccagatgcagatttgtgttttgttttcttgttatcactgtcacacagcttataacatgtatgcttttcagaatacagttgtctagccaagccatcaagtgtctgaaattcaatattggtttatgcaaatacagcaaacttttatttaagtagataggagaatatgtttaaaatattaggaatcctagaccatattttcaagtcatcttagcagctaggattctcaaatggaagtgttatatataatatgttaaaaacattttgctttcctggctaattatttgatccttttaaatccaaatttgaatcatttgtcatgtatgattatttctgttaaatgtacacagtatttaagatggatatttggtggctctatttgttctgatatcttttggtctaaattatgaggtaccaagattgtttctttgtttctttttttcaaattgtgtttagaaatactgtaataaatatgcagtagtgatataaagaattatatccaaggtaatataaaagccattacgtatgaactcatccgtgtctcattttgtgttttattttgtgatctcttgtccactaagtatcttgttaaatgccagtatctcagtctttctgaagccctgaaatggtaattgtagcatttcagaaaatgtctttcatttcaatcaataaaaagcttttgtaaaaaaaaaaaaaaaaaaaaaaaaaa

SEQ ID NO: 37 - DNA, 174566 bp, Homo sapiens
gaattcatctggtttaatcagaaaacttcaaagtagaggtggcaccttaaatcacttgaagaaaaagatgaaaaaacacagagagagagagagaaagtgtgtgtgtgtgtgtgtgtatgaaaaaaacagaggttgtgtatgcgtgtatattgtgtgtgaatattgtttgtgtatattgtgtttgtatattctacccctctctcaataagttttataatatacaaacacacacaatatatacacatacacacatatacacacacaaactctagaacaaattaaataggttttctctaattgattaggataggtaaagtaggaagctaggcagcagagggcattaaagccattaccaggtataaactttaagtagtcactggaaatcattatggctttctaaacaaacaagtgatgatcaaactgatgtctgaacttgatgattcttaaaatgattatttaaaagatgattcttttaaagaagatgtgtaaatagtacatacagcaagatacatgtccctatcttgtgaaagaaatttttaagtgaacaaaattcccatttaaaaattaaaagctcttttttaattttacaggtagaaacagcaagtcaccttaagcaaatttgagataaaatggaaaatcatttgcagccactgtaggggtagaataacagaaacatttttctttcatcagctcagcttctatacatccaataccacatggaatgcagaaatctggggaaagggtggaccatttatacaaaaagcccaggtaaaagaagagaatgagtttccaactattattcttgagattcaaagttagcataatctgtcagagagggatagggtaaaaaaaaaaaaaaaaaagatgaaatgaggggcctggtcactgtattgagtcagcaaggggaaagatggttctaaattcatgaggtggctgataagaactctattctcacctaaccctctaagacttgggattgtaaagtggctgctgagtgaatataaagagctgtacctttgagaatcttgtttagtttgtcatggggctttcttgcttgaactcacacaatgcttccttgatgcaggtccatataaagagctatacgcttgggagtacagtggctcacacctgccatctcagcattttcagaggccaagcggggaattgcttgataccaggagttcaagaccagcctgagcaacacagggagaccacatctctacaaaagattatttttaaaaattagctgggctgagtggcatgtgcctgtgatcccagctacttgggaagctgaggtggaaggattatttgagcccaggaggtctaggctgcagtgtgcaatgattcagccattgcactccagcctagatgacagagcaagacccagtctcaaaaaaaagattatgaatggctagtaagcatgtgaaaatatgcttgacatcattactcattaaggaaatgcaaaactaaaaccacagtgaaataccatttcacacctattataacagttataataaaaaaaaaaatcaagtgttgagaagatgtgaagaaactagaatcctcatacattgttggtgaaaaatgaaaatgttataaacactttggaaaacagttttgacagtttaagagttaaacataaattcaccatatagactaaaattcttctcttaggaatctccccaagagaaataaaagtgtatgtccagaggaagacatgtatacaaatgttaatttcagtattattcataacagccccaaactggaaataatcaaatgtccatgagccaatggaccaccaacaaagtaaagaatatccatacaatataatatagatttatttagccttaaaaggggatgaactaccgatacatactacataaattaaccttagaaaccagaagtgtgatgtcaccaaaatggcagaacagaagcaatctggcttcattctcccctactgaaaaccaaaaacaaatatccagtgccaagattaacaccagtaatatcccagaactcacatctgaagctgaaatgactcctgggggcacagagaagtgaaaatctccaagcagatgttaagaaaaaaggacttctatatccacaacacccctcccccaaactgccaggtaccatgaggaaaagtccccctgaaatcttcatttctacagtggaaaaagtgagaccatggcagtcagccagcttccccaccatcttgggttcctttacaggaaaaccattcctgaatcaacccaaaggaagtattatgagtgcctataggcaataaaccccctgagggcagctagaaactaaaagagaggtgggaccagcaaccccaggccacaaaattctgctctttatctcagccaaaggagacaccaaatcagagtggctgttcagcagtaccacactgtaggaaggcacatgccatggctccactcagcatgaacctatagacagccttcccacacagctagagtatcgcttttgagacctccccatttgagacatgcaggactctgaacagttgtgaagccaaggcaaatctgggtttaaaatacaatctagtaacaaaaagatgcagtgatctagggttaaggtgactcaacaggcaaagtgcaaaaatcctctaagcatatataccctgggaagaccaaaacaagctagacagcaaagactggaataaataattaatggttcaatgacaagatatagacatatgtccacaaggaagaacagcaaactaggaaccatgacctcctcagatggacagagtaaagaactagtaactgaccttaataagacagcaatgtgtgagctctcagataaagaatccaaaatagtggttttaaggaaatctcatcaaagactgtagagacaaagaaggtcaccaagtaataataaaggggctgatccagtaagaggatataacaattataaatatgtatgtacacaacaacagaggacccaaatatataaagcaaacattaatagacctaaagggagagagagactgcaatgcaatcctagtagaggacttcaacacaccattctcagtaatggacagatgatccagaaagaaaatcaacaaagaaacatcaaagttaaactacactctagatcaaatgaacctgacatttgcagaacatttcatccaactgctgcaaatacacattattctcatcagcacatcgaacattctccaggataggccacacgtcaggccacaaaagaagtctcaacaaattttaaaaagtcaaaatcatatgaagtacttttctgatcccgatataataaaactaaaaatcaataactaaggaattttggaaactatgcaaacactgagactgctggcaagatggctgaacaggaacagctccggtctgcagctcccagcaagaccaacacagaaggccggtgatttctgcatttccaactgacgtaccctgctcatctcattgggactggttgggcagtgggtgcagcccatggagggcgagcagaagcagggttgggcatcgcctcacccacgaagtgcaaggagcaggcggcggcggggagggggtgggagggctccctcccccagccaagggaagccttgagagactgtgctatctgggccagatactatgctttccccacggtttttgcaatccacagaccaggagattccttcgcgtgcctacaccaccagggccctgggtttcaagcataaaactgggcggctgtttgggctgacaccaagctagctgcaggagtttttttttgtaccccagaggcacctggaatcccagcgagacagagctgttcactcccctggaaaggggctgaagccagggagccaagtggtctcgctcagcgggacccactcccatggagcccagcaagctaagaaccactgggttaaaattctcgctaccagcacagcagtctgaagtcaaactaggaggatcaagcttggtgtggggaagggcatctgccattactgaggcttgttttcccctgacagcgctaaaaaggcctggaagttcggactgggtggagctcaacacagtgtggcaaagtggctgcagccagactgcctctctagattcctcttcactgggaagggcatctctgaaagaaaggcaccagccccagtcaaggggttatagataaaactcccatctcactggaccagcgtatctgggggaaggggcggctgtgggcacaacttcagcggactttaaacgttcctgcctgctgactctgaagagagcagcagatcctgacaaggagggctctcccagcacagcgcttgagctctgctaagggacagactgcctcctcaactgggtccctgacctccatacctcctgatggggagagacctcccaacagcgattgtcagacacctcatgcaggagagctctggctggcatcagcctggtgcccctctgggacaaagcttccagaagaaggagcaacagcaatctttgctgttctgcagcctacactagtaatacccaggcacataaggtctggaatggacctccagcaaactgcagcagacctgcagaagacgggcatgactgttagaagaaaaagtaacaaacagaaagcagtaacatcatcaacataaggaacccccatacagaaacaccatccaaagatcaaaggtaggtaaatccataaagatgaggacaaaccagcacaaaaacgctgaaaattccaaaaaccagaatgcctcttctcctccaaatgattgcaactcctctctagcaagggcacaaaactagacagagaatgagtttgatgatttgacagacgtaggcttcagaaggtgggtaataacaaactcctctgagctaaaggagcatgttctaacccaatgcaaagaagctaagaaccctgacaaaaggttacaggaactgctaatagaacaaccaatttagagaagaacataaatgacctgatggggctgaaaaacacggcacaagaacttcatgaagcatacacaagtatcaatagctgaatcaatcaagcagaagaaaggatatcagagattgaagttcaacttactgaaataagacatgaagacaggattagagacaaaagattgaaaaggaatgaacgaagcctccaagaaatatgggactatgtgaaaagaccaaacctacgattgattagggtccctgaaagtgacaggggagaatggaaccaaattggaaaacacacttcaggatattatctgggagaacttccccaatctagcaagacagggcaacattcaaattcaggaaatacagagaataccactaagatactccttgagaagagcaaccctaaggcacaaaatcatcagactctccacggttgaaatggaggaataaaagttggctgagcgtggtggctcacgcctgtaattccagcactttgggagcccgaggcgggcggatcacaaggtcaggagatcgagaccatcctggctaacacggtgaaaccccatctctactaaaaaaatacaaaaaattggccaggcgtggtggtgggcgcctgtagtcccagctacgtgggaggctgaggcaggagaatggcgtgaacccaggaggcggagcttgcagtgagcggagatgtgccactgcactccagcctgggcaacagagcgagactccttctcaataaaaaaaaaaaaagttaagggcagccagagagagaggtcaggttacctacaaagggaagcccatcagactaacagcagatctctctgcagaaaacctacaagccaaaagagagtgggggccaatattcaacattcttaaagaaaagaattttctaactggaatttcatatccagccaaactaagttttataagtgaaggagaaataaaatccttacatacaagcaaacgctgagggattttgtcaacaccaggcctgccttgcaagagctcctgaaggaagcactaaatattaagaagggaaaaactttcttaatataagaaaaactttcttaataccagccactgcaaaaaaaaaaaacagtcgtatataaagaccaatcacactatgaagaaactgcatcaactaatgttcaaaataaccagctagcatcatgatgacaggatgaaattaacatagaacaatattaaccttaaatgtgaaggggctaaatgccccaattaaaagacacagactggcaaattaaatgtattcaggagacccatctcacatgcaaagacacacataggctcaaaataaagggatggggaactattcaccaagcaaatggaaagcaaaaaaaaaaaaacaaaaaaaaaaaactgggggttgcaatcctagtctgtgataaaacagcccttaaaccaacaaagatcaaaaaagacaaagaagggattaatgcaacaagaagagctaactatcctaaatatatatgcacccaatgcaggagtaccccgattcataaaacaagttctttgagacgtacaaagatacttagactcccacacaatgaaagtgagagaatttcacaccccactatcaatagtcgacagctcaaggaaacaaaaaattaataaggattttcaggacttgaactcagctctagattaagcagacctaatagacacctacagaactctccacccccaaccaacaatatacattcttctcagcacttcatcgcacttattctaaaattgaccacccccaatcaacagaatatgcactcttctcagcactacatcgcacttattctaaaattgaccacataattggaagcaaaatactcctcagcaaatgcaaaagaatggaaatcacaacagtctctcagaccacagtgcaatcaaattagaactcaggattaagaaactcactcaaaaccaaacagctacatggaaactgaacaacctgctcctgaatgactactgggtaaataatgaaatgaaggcagaaataaataagttacttgaaaccaatgagaacaaagacacaatgtaccagaatctctgggatgcagctaaagcagtgtttagagggaaatttatagcactaaatgcccacaggagaaggcaggaaagatctaaaatcgacaccctaacatcacaattaaaagaactagagaagcaagagcaaacaaattcaaatgctatcagaaaacaagaaataactaagatcagagaaaaacagaaagagatagagacatgaagagtacttcaaaaaatcaatgaatctggaagctggttttttgaaatgattaacaaaatagactgctagcaagactaataaagaagaaaagagaaaagaatcaaatagacacaataaaaaatgataaaggggatatcagcactgaccccatagaaatacaaactaccatcagagaatactataagcacctctacacaaataaactagaaaatctagaagaaatggataaattcctggacacatacaccctcccaaggctaaaccaggaagaagtcgaatccctgaatagaccaataacaggttctgaaattgagacagtaattaataacctaccaaccaaaaaaagcccaggaccagatggattcagagttaaattctaccagaggtacaaggaggggctggtagcattccttctgaaactattccaaacaacagaaaaggggggactccgctctaactcattttatgaggccagcatcaccctgataccaaaaccaggcagaaacacaacaaaaaaagaaaatttggggccaatatttcttatgaacattgatgtgaaaatctcaataaaatactggcaaattgaatccagccacacatcaaaaagcttatcatcacataaacagaaccaatgacaaaaaccacatgattatctcaatagatgcagaaaaagccttcaataaaattaagcaccccttcatgctaaaaactctcaataaactaggtattgatggaacacatatcaaaataataagagctatttatgacaaacccatagccaatatcatactgaatggacaaaagctggaaggattccttttgacaaccggcacaagacaaggatgccctctctcaccactcctattcaacatagtattggaagttctccccacagcaatcaggcaagagaaagaaataaagcgtattcacataggaagagaggaagtccaattgcctctgtttgcagatgacatgattgtatatctagaaaaccccatcgtctcagcccaaaatctccttaagctgataaacaacttcagcaaggtctcaggatacaaaatcaatgtgcaaaaatcacaagcattcctatacatcgaaaacgggcaggcagagagccaaatcatgagtgaactcccatttacagttgctacaaagagaataaaatacctaggaatacaacttacaagggatgtgaaggacctcttcaaggagaactgcaaaccactgctcaagaaaataagagaggacacaaacaaatgtaaaaaaattccatgttcatggataggaatgatcaatatcatgaaaatggccatcttgcccaaagtaatttatagattcagtgctatccccatcaagctaccattgactttcttcacagaattaaaaaactactttaaatttcatatggaaccaaaaaagagcctgtatagccaagacaatcctaagcaaaaagaagaaagctagaggtatcacgctacctgacttaaaactatactaaaaggctacagtaatcaaaacagcaaacagcatggtactggtaccagaacagatatatagacccatggaacagaacagaggtctcaaatagcaccacacagctacaaccatctgatctctggcaaacctgacagaaacaagcaatggggaaatgattccctatttaataaatggtgttgggaaaactggctacccatatgcagaaaactgaaattggaacccttccttacacctaatagaaaatataactcaagatggattaaatacttaaatgtaagatctaaaaccataaaaaccctagaagaaaacctaggcaataccattcaggacataggcatgggcaaagactttatgactaaaacaccaaaagcaatggcaacaaaagccaaaattgacaaatgggatctaattaaactaaagaacttctgcacgcaaaagaaactatcatcagagtgaacaggaaacctacagaatgggagaaaatttttgcaacctatccacctgacaaagggctgatattcagaatctacaaagcacttaaacaaatttacaagaaaaaaaaacccatcaaaaagtgggtgaaggatatgaacagacgcttctcaaaagaagacatttaactttgggaggctgatgtgggcagatcacaaggtcaggagatcaagaccatcctggcaaacatggtgaaaacctgtctctactaaaaatacaaaaaattagccaggcatggtggtacgtacctgtagtcccagctactcaagaggctgaggcaggaaaatcacttgaacccaggaggcaaaggttgcagtgagccaagaccgtgccactgcactccagcctaggtgacagagtgagactttgtctcaaaaaaaaaaaaaaaaaaaagaagaagcaatttatgcggccaacaaagatgaaaagaaagctcatcatcactggtcattagagaaatgcaaatcaaaaccacaatgagataccatctcatgccagttagaatggcgatcattaaaaagtcaggaaacaacagatgctgaagaggatgtggagaaataggaacgcttttacactgttggtgggaatgtaaattaattcaaccattgtggaagaagtgtggcgattcctcaaggatttagaaccagaaataccatttgacccaacaatcccattactgggtatatacccaaaggattataaatcattctactataaagacacatgcacatgtatgtttattgcagtgctgttcacaatagcaaagacttggaaccaacccaaatgcccatcaatgatagactggataaagaaaatgtggcacatatacaccatggactactatgcagccataacaaagaatgagttcctgtcctttgcagggacatggatgaagctggaaaccatcatcctcagcaaactaacgcaggaacagaaaaccaaacaccacatgttctcactcataagtgggagttgaacaatgagaacacatggacacagggaggggaacatcacacactggggcctgtcagggggtagggggctagtagggggatagcattaggagaaatacctaatgtagatgatgggttgaagggtgcagcaaaccaccatagcatgtgtatacctatgtaacaaacctgcacgttctgcacatgtatcccagaacttaaagtataataaaatagtctatttgcttacaaactgaacataaaggaacactttttaaaagaaatcgacttgctaatattgtcttcaataaatccagacacttcaccacttacatccatcagaaatgacaaatgataatgtagcttttaacataagtctcttcatttaagtataaaaggcaatcttgctttggactaatctttccttatctggggaattttttggaaagagacaaaaagcttatctttcgtttttagcatatgtataaacagaacaaaataaaaacagcaagccttaatatctttcgtttctcattttaatcttgctaaaaaatatttaatcatttgtataaaaatattgcaagcaacaaaagcgtattgtggtaatagttctacaactcaataaatttaataaaaatcagtggatgagtgaattttatatacataaattataccttgataaagctgtttttaaaagttctaaatcaaaggtgaaccaaaccagtatttcattcaaacaagtccatgggaaaaaaaaaaacaaaccatatcacccatcaattcctaatcaatgttgctaattacctatttgatctccgcattatcattattaccatacatttatggctcacttttcagtttgcaaaattcacgtgacaactctgtgaggtaaacaagttagctattattactctgatatagcaagtttttaaaaactggcaactgacttgcctaagagtcacaggactattaagtatccatccaaaagcaagcccagttctgttgaacctaattcttctcaacacactgctcttccctctaaatcattttaaaacaaatttcctacctaccattgcattcaggaaaacttcgctccttggcgagagcatttacaaagtcatctaactccaccattccattctctgtttttaaaaagagtttagattatacattctggtgtatttttgcataaaggcaaatttacattttaacacaactatttttaaaatttacttgatccttcatttcatcatcctatttctccttcatatcatgtctcataattctttctagattaagtcagttcatttgaacaattattgagagcatattagtgccaagaaccatgctaggcaccgagaatacaaaaataagaaagacacagtccttgctttctcaatatctattacatgcaaaggactgagttagatactaatttcttaacagatctaggaaaaaagaaagatgtccatatagatagaccatgagagagttaaggagtctatttcataccatcttgaaaacccactcaatatactatccattaagacaccttaacaatactaaccagccctgataaaaccaaggattcccatctctatctccctagtatccatgtggtccaatgttttacctatttttagatataaaccctcagagtgatcatgtcaatcctgataagcagcaaaaagggctcaataattttagtgccacccactctttatataatttttaattgaatcttctttcagatttgccttagctaaaaaattgtgcccagattctgaggattcacttctaatgttattctccaatcagtctttccccaaaatgtcacctctttcctctcctcaattgaacttctgttgtggaaaatgcttagttactgataaaaataacttccctagtataaaaacccttcctagaaacttaaactctgcctttaacttaggctagtgactgggatatgccactcaacatctaaatgttaactgctaagcatacctggctctaaattcccccgtattttgtaatctccaattattaatctttggatccttgggctatttgtgcagatatatccataccccttagatattgtggtcttgccatctgaacctcgctacaactggatcagtctccccagcactaccctactattaataggcacagatagggatagtgatgaagagctttactgaaatgatctggaaatacgaaaggctccaaaccaatccatttggtcagaacttaaaggaatttttttttactattttccatttttatatctgaattttctttagaatgacccattctgtcccattcctaatttctaattgagaggaattcctccaatatttaatactatccgataaaaatatctaactttctcagaaacttcagtgttatcagtctctcaccatttctactagtgtctgtcacaatcttctggaattcttcatctaataaattaattcctgttgaaggcaaaatagactgaagttcttctgctgcaatgtaattttcttgaagtttactgatagcttcacagaagttttctaaatacacaaaatgtagagaactattaggcaacagaatttatgtgtcaaaagcaataatactcaaaatctttagaaattagagaacaagttttatctattttatattaccttatagattttataagactgcttttctctccatatctgtttatattacattatatttaatctttctcttacagctcaaacacagaaccgtcctaacattctataaacatttataatctacttgtttgggggaacagcctgttccagtggcccagccaatgctgcttgcttctgattaaaataaaattaatggggccaggtatggtggctcctgcctataatcacggcacttcgggaagccaaggcaggtgggtcattggaggtcaagagtttgagaccggcctggccaacatggtgaaaccctgtctctactaaaaatacaaaaattagctgggtgtgatggtgcatgtgtgtagtcccagctactcaagaggctgaggcagaaggatcacttgaacccgggaggcagaggtcgcagtgcactgagatcgcaccactgcattccagcctgagtgtgtgtgtgtgtgtttgtatgtgtatgtgtgtgtgtaaaattaatgagtccaagaaataaaaataccgaagtgttttgtttaaattgaagaattccaagcaaaaatgtagagttcttcaccctcccattaatttactctaccatgttttcagttcataaccttcaaaaaataaaatcttagaagcaaatacacatagacgtcatgtgcttcttactgatgcactgagatgggtacaatatcacttctgaggtaatctgaccaaaaatgcataacctgaatttatttgtgaaggaataaaagaaaaatccaaaatgaagagtattatacaagacaactagtcaatagtcttcaaagtgtcaaggtcatgaaaaattgaggaagcatcccagactgaaggggactaaagaaaagtgacaactaaatgtaatgggtgattctggattagatcctggaattgaaaaagaacattcatggaacaactgacaaatttgaataaggtctgtagatcagtaacagtattgcatcagtgttaatctcctggtttagatcatgtcctaatggaaatgtttgtactatttttgtgactcttaagaatgtgaaattatttaaaaatgaaaagttagaattttttaatgtaaatcatacaggcagtcatattccataaaagtccaattaccattaatttgttttgggaagttatgccagataaactatttcatacttctctatattcagaacattaagtatggctgtggtagatgacatcattttattttagtgacacgagaaaggtagatatcactttcttctgacagcctcttctacccatgtctgtctgctgtttcattattcctttaaccaaggttttaattcttttgaaataaaaataactctcagaaattcaaatgaggcacaaagtagcagcagtgcattggtaaaggaatcagaatcaggatgataatcactgtgcctccttaatagatcacattccttttttccattgagttatttgaattatgcactaatgtatgaatcacaaaattttcactaaacaatcattttatctattacattaaatactaaatgtgatatgacagtaagtttttaaaagagaataaatatgacttaagtaacttcagcagaggactacaggaagaaatctttaactgggttccacacacactgcttctatgatgaaagtaatacaaggagagaaaatatattggttgggaaaccattgctcatctttgagaaaaatcataaagacttggagccctagatatatagtattattttttcctgatattctccttccataagagataatacctgaagtactatgaatattatatatttaaattacagcactctaagcaaaaatttcacacagatttcctacttgtttaaatgtttaataaattacaaaataaacgtttccaaaagaaaccaggccttctactttctaggaaatattaatgattgcaattaatcactgaataagtttctcaggaaaagttaagctcctccctaaagagggcatctggaaaggaattatcatcaaaatcacaatattatatccattagtctatgtgtcagaagtggcaggccggacgtggtggctcatgcctgtaatcgcagatccttgggaggccaagacgggagcactacttggggccaggagttcaagaccagccttgggaacattatgggacccccgtctctatgaaaaaaaaaaaaagttagctgggtgtggtggcatgttcctatgctcccagctacatgagaggctgaggaggtgggaggatcacttgaacacaaaaggtcgaggctgcagtgagctaggatcacgccactacactccagcctggttgacagagtgagattctgactcaaaaaataaaaaatagacatactattcagtggcattaatcacatttacaaagttgtaccaccatcactactgtacatttccagaatttttgcataggcatggtggttcacgcctataatcccagcactttgggaggccaatgcaggaggattgcttgaggccaggggtttgagaccagcctgggtaaccctgtctctataaataatttaaaaattaaaaaaaaaagaagtggtggttacccagggtgttaacaattgaaatgcttacaactatctaataattgattcattctgttcatttctgtgatgactgaagaactcaagaacctagatttttacttacccagagtactaattgcagttttttccgtagacgaaacctgtttttggagactggaatgctttcttacagctggcttctgaagttttgggatactagaaatatcacttttatccagagacttactgaggcttgtactactcttcaagctttgtggtttagactttgagtcatgaatttcacccttctctgaatgttttttaaagtttatgccattctttgaatatggttcttggactcctacattactgctgccaaccccacccagaaattttcttatttgccaagtattttttggtcttttagattcaaggtcatcattctccataattttgctataatattggttgctttttttatttaactttttggatattgaaggttcagggagtttggaagacaaactatttttcttcttatattttagatagcatcctgctacacttgataactttctgtctgaagtaatttcattcaaaggtgatccttctgtaattgctaaataagagaaatatacaattatttcatttacctgtataatttgcaatacatttcaaaaataacaactaagtcctcatgaaaactattcaagaaattatcagtttcttaaacatataaaacaaaccaaaaaaattaaagaactgacagtcaaaagattggactattaactaggtcaaatgtaatgtgctgctttaatatatttacatattcccatccaaagctatttaaagttacagtaaaactaaaatgatagcctaatgaagtatatggttctcattccccactccttcccaattgacaaagataatagattaataagctaatacagatagaaattccttacttataaaaggcagaactatgaggaaaggggagattttatttataaaattagaacttaagtaattactctcctaaatattcttggtatttgtggaggaaaaaataacttcatatataaaacaacatctttagaaaattattaacacaatgccccaaactgagacttcatttacaaaatttatctgatgtttcagaatcttatcttacattttaataacacattttaaagtatttcaaatgttataatatttgatcctcaaaacaactctatgagactgtcacgcagcagcaatataatctcaactatgaataaattttgcctagaggaaataaaaaagtttcttatcttagactctatgagaattaacaattgaaaataattaaatgaaaatattttaatattaaagtctgaaaatacttaaagatggtgctatatatgtatctctaagtgcactatgtatcagataaataggttagtgagcaggtaaaaatataatctttgacacttctgatttaggcttttggaccacaccaaacagcctgcccagaatctctgattctcactgattaagggctttcccagtccttcaaatgcagagacatcaacataaggcaacaagaaacatgaaaaatcaaggagacataatactaccaaaagagcacaataatctcctgatagctgaccccaaagaaatgaagatacagaaacttcctgacagaattcaaactaattgtctagagaaagttcagggaataaaattaatgacatacagagaaaaaaattcagtgaaatcaggaaaacaataaatgaccaaaaacagaattttacagagacactgaaattacacaaaagaaaataaataaacaaaaatcaagagctgaaaagtgtaatgaaagaaatgcaaaatacaatagagaacatcaacaacataactgatcaagcacaagaatgaatctgtgaacctgacaacaagttatttgaaaatatatagtctgcggtgaataaaataaaaagaatgaaaaataatggggaaagcttacaggatttatgggacagcatccaaagagaaaatagtcaagttataagagtttatgaaggagaagagaaagacaaaagagtagaaaacttacataaagaagaacagaaaacaatccaaatttgggcaaatatataaatatccaggtacaggaaggccaaatgcctctaatcagatgaattcaaacaagactacaccaagacatattataatcaaactgttaaatatcaagaacaagagggagattctgaaaatagcaaaagtaaataacatatacgttccaataaggacagcaaatttctcagcagacaccttatgggtccatagagaatggactatatattcagagtactgaaggaaataaactgccaaccaataatactgtacctagaaaaactgtccttcagaaatgaagataaagactttcccagacaaaagttgaaagagttcatcccctatatttgtcttacatgaaatttcaaaaagtgttcttcaagccaaaagaaaaggatgctgtttagtaacacaaaaaataaatgtgtaaaactcactggtaaaagtaagtacacagtcaaagtcagaatacactaatactataatggtggtgtgcacttcacttacatagtatgaaggttaaaaataataaaagctacaatgatttgttaagggaaacaatataaaaatctgtaaattgtgacatcaaaaattataaatgcagaaggagagatgaggtaaaagcatagtttgtttatgcaagcaaagctaacttgctatcagcttaaaattgcctgtcataactacaagatattttgtaagcttcagagtagccacaaatcaaaaacctacagtaaatacacaaaagataaaaaagtaaaaaaaaatcaacagagaaaaatcagtcacaaaagaagagaaaaataaggaaacaaaggatctatgaaacaagcagaaaacaattaacaaaatggcagtagtaaaatccttccatatcaataactaccttgaatgtaaatgaattaaaatctccaaagaaaagacataaagtgccatgtggaactgtgaatcaattaaatgtctttcctttataaattacccagtctcgggtatgtctttattagcagcatgagaaaagactaatacagcaaccaaaacagtatgtataaaaatagacacagaggccgggcacaggggctcacacctgtaatcccagcactttgggaggctgaggcaggtggatcacctgaggtgagaagttcaagaccagcctgaccaatatgttgaaaccccatccctactaaaaatacaaatattagccgggcatggtcatgcatgcctgtaatcccagctactcaagaggctgaggcaggagaatcgcttgaacccaggacgcagaggttgcagtgagctgagatcacgccactgcactccagcctgggtgacagagcgtgactctgtctcaaaaaaaatggacacagagagcaatggaacagaataaagaacccagaaataaagtcacatatttacacccaactgatcaactgttggtttacacccaacaaagcaacaaagccaacaaagcagtcaagaatatacactgaggaaaggataccctcttcaataaatggtgctgggaaaagtggataaccatatgcagaagaatgaaactaaacccctatctctcatcatatacaaaaaacaactcaagctggattaaagacttaaacataagacctgaaactaaaaaactgtttgatgataacatagggagaagtctacaggacattggtctaggcaaagattttatgactaagatctcaaaagcaccagcaacaaaaacaaacatagacaaatgagactatattaaactaaaaagcttctgcacagccaaagaaataacagattgaagagacaacatcttgaatgggagaaaatatttgcaaactattcatctgagaagggattaatatccagaatttataaggaattcaaggaattcaaacaacagtaaaaaaaaaaaaaaaaaaaaacaaccattaaaaactgggcaaagagccagacgcggtggctcacgcttgtaatctcagcactctgggaggctgaggcaggtggatcacctgaggtcaggagttcaagaccagcctgaccaacatggtgaaccctctctctactaaaaatacaaaactagctgggcatggtggcatatgcctgtaatcccagctacttgggaggctgaggcaggagaatcacttgagcccaggaggcagaggttgcagtgagccaagatcgcaccactgcactccagcctgggcaacaagagcaaaactccgcctcaaaaaaaaaaaaaaaaaaaacaaacaacaacaacaacaaaaaactgggcaaagaatatgcataaacatttctaaaaagaggacatgtaaatagcattttgagtattatattttatctccttgatttaagagggtaaattattcagagaaggttttcaaaaccctttataaaataaaacttataaattaagatttaatgtaaagactttaattataaacaaaacttgtcatagcaacaagagctcacttacaaacatcctcatactgttcctgtagctcattcaaagtaaatataatatccccaatatccaccatgtggttacctgtaatagaataagttcaaatactgtatttacttttgaacatagatatatctgccatcctattctaatatgaaaacaacacagaatgtgtggcaagtaggaacaaagagccaactattacaaagtcttgaataaaatctgaaatcatgaattaataactcagtacacgcccaacataagagtaagaccatggtcttttctccttaataaaagagtttttcatcaaaagaaatagtcatgttttaagctcttatgctaatcaggatattttttcattttacatgttttttagagtttattacaggtatttatttactcttttgacttcatttctagattgtgaactcctcaagaacagaggatgtgtttttcctttgtttccccaatgcctcgcaaagtacctacttcttatcactgaaaattatttttggctgaacaaaatatacagaaggtgatttaaaaaacaatgtaatgtctacatagtgaatagcaaacaacgatttactttgtaccttctctgtgtccagcactcttataacttcccattattcctgcccctgcccgcctaagaccattttacttcttggataatgcatgattgaggatgtgttcagatgcagtcaccttgaataatgtcatttcaattgtgcacagaggtagaaaatgctttgcccaatagttcttgcctccatatatttgattttgcttgccatccaagatgaaaaagactgaaaatttacttatctataatagtgatggttttttcttcagtctattcataagaaatcaactgttcaataatatgcataagtgaaaactgagaggaagaagcaaatttttattgttttccagaaacaggaagatatgtttattttactgtccaattatttcctttaaaaagttgaatgtttgataaaataaacttttggtaccatagaaacctttcaacatctacaatgacatattattactatgcacaacttcaaaaacaaatgcctccagctccaagtaaagtgatgttgaacatcctgactatagttcggctgtaggaaatttcttgtattgccaatggtttcctcgccttggaaaaaaatacacaattgaaaaatataaataagaccttcaatgagttgggaataataaaaatgatatctgaagttcagtcatctagatcttgggaagtttgcagtagctctaagggttcaacaagcaaaataaaaccctgtgaatatttaaacttcagtcatccaggaggtcctgtaggttcacagtcggtctatcaaaaacaaaagctattcctgttgtggtagaacttggtatcaggttcatataccatttttcaccagctcatgaactccattctcatcgatgattaaaggtgcatggaattctatatctgccacataactttctattccttcctcagcattagagataagaggagagatttcacactggattggtacatcattggcatcctttaagtgggaaattgctggaagatgatagccattttcatctataaagtgacccctgcattgagaacccagcaataatgaaagtgtgccttgcggtagtagagttgtctttcccattctgactgtcagcattctttagtgtggaaaagtcatcttcccataatatttcataaaccacagacttctttgtgaactagaagatttttctatacttattatggaaaagacaaatttttccatacttattccactgggtttatctggcttaattaagtgctgttgggtatccacataaggaatcttcttttgagccacatggtgctacaactgaggttcataaacattgacaacatctctcagaaatggtacagtgaataaatggttggcaatattccccacattgaacagcagtcatccatctgagcttcatttctgagctgttgccagggaaatatcactatattctaccacctggtaaaatccatccactcggcaaaccactccaaccagttctgtagggtttgttttctctaccacctttgctccacagtctgctcctttctgaatgcaaaatccaatgaaccgtgggtctgccacttttactaatacactgtcaacacaatagacacgaatgttccaaatgcctctttgctccatatcctccacaatatgccaggctgcaagagcctgacaaagaccaccattctcatctggagccatagaaactttgttcttctcttccaaaataatttgcccatcaaaactcatggcagggagcattccttactgaaaaaaagattatattttctattttttttaaaccaaagtacttgtgcttggtgaagaactcctttgtagattctgctgttctgccactgatcattatatggaataatgcatttgttgccataatatttttcagctaactgttgtagcttcaggatatgctctgcttgaatctgaaaaagtgtcttatgggatggcaaaccaacatcatacatcccctttggatatgcaacgagtctagtcccctgcccaccagctagaacaactgtgactttgttctcagaaatctggaaaactttgctttcccaggcctggagctgatctagcttccctgcagcactgcccagtacttctcgagggacaggttccattcacgcatccaccttttcttgatgagaggactggttaaatccttcaatggccttttggaaaaagaagttcagttcctgaaagtcgatggcctggagctctgcataaagttctacctgtcaggcttcttcaagctcattccagaaacgtagtgggtgttcttgctcagctttggacaacctgagtttaaggtcattagtgttcataatgctctgatagccaagctttgtgaaaataggggtgcaatgcatgtatctacaaagcttcctcagcgggaccacagctccacccggctccttctctgccggcgtcctacgtcccctccaaatatataccctcatcctgggccatggcggcggggtggggcaagccaggaccagggccaaggggagtggcccagccatcctgcccctcttgccgccacgagaagcaaatatgtaaattaaagaatagtatcattttggtgttgggtccacctgattcactctgattctctgaaaattggtaaactatgtatttcaggtgcaggcctttaaatcactgcaaagcaagtactatgtgtttgaaccaatcaaagaaatgctagacaaaattggtgctaaattgccttctgattagagattgcttcctacattttggtttcttatttccttggtatttatcctcattctggttttgattatagttctaacacttcccataacctccccagtaactggcacttgtggtagattgattccatgtcccatgttcttagatcatggcttaagtcctaagacaactcaaagcttcaaccctcaagctcttgaatctgatcactgaaaagtattctgttagaccatacatgtattaatccagtggaaaaggccatcttgcttttacctgctcttcatttagaaaactcctttctctgaacagaagtccaatgtcaactaataagagtatggtagtcaaccatgttcacagattcattagctcttgctcaaatttattccttgcatctatgcaataataaacacctattatgaaactcccaaacaaatattacctacttaaatagtccctagtggccaaagacgcgttcgagaatctgaaatgactatcttggtccctatctaacttagcaaaaccttaaagaatgattcctggttgaaactaaggcaatcaatatggtcataggtatcacttatttcctaaagggagctcaaaacagcctcctactctaaggtatataattctggaggaaattcatcctggaaaatgcagctacctactgtgagaggaaaaaaatgatcctaattattaaggtcatatatgcaaggcaacgttactctgaaggtgctaagtgaccattaacactacatttctgtaatcttcaggtagctccacaatattgaaagcctcctctagcaaaaactgcactagtcacaacttcccacccagttcaatttccagatctctaacctccatgagagaaaaaaaaaaaaaactgctataccaatacagtatttcagaaaccaaaatacctgaccctctaagaactgccatcagctgattttccatatggcacttcttgccatatcttaataaagcaaatcctccttggactttcctgaaaatttcagggggctaattccttctccctcattgcaaacatctataaagatgaacatattatctacctatcatctccaacaatataccaaatgcaaaaataagatgctggaacagtacctgcagtgctatgtcttcttttagcaggactgtgttatattattccttactgcaaaattctgctacagaaaaattaacatctcctacctgggtgacccaaaatttttggcatcctggggttaatgtttcctttaatattaaaatagctcagaccccagagcatatactaacataaatcaataccttgaccaaaatttgaggattcctgagtcacttgtgctctttttatttttgctttgtttctctattcccatggactcttgatctcactcacattattaccttctacaggtacaatcctctttctgccccaagcagatcgaacatagaacctataggtctttatccttgaactctccccaccaacaatactaatacaagtctattgtatataaccaacttttactggtaatttgcaattgatgggagtaagggagttcttaagaagcacagcaagcaactacatactatagtcctaaagttctatggttactctatcctcactcactcttaggttctatccatcttcttcctccactactgagccactactatatttcaaattcctgttgctttcttatgtacagtactttatcttatctttttgctcaatctaggtgtttctcagtatgttttaactctcataatctaacatatctattaagattattttcctggtcaaaagataaggaccttccttatgaggaattttgcctcaaactacagccagcttattcatatgataaaatgaagaacattttgttctttctgattggaagatgtggcatgaggaatcagaattattcattcattcaacaaatatttgttgagcggttaatatgtgctataagcaccacgctaggtactgaagatacaatattaagctaaagcagacatgatatctgctcacctgatgctcagtcttatttgaaatatcaatgtcaatcaaacaaaaatacaaatttcaattgcgaatagtgctataagagtgtataacatgagaatctgacctactcagagaggtctgggaaaacatccctgaggaaaagacagttgagtttggatctaaagtgtaagtaggaattacctaaggggagaaaaaggttcaaggaagagaaatgaacacatgcaacagctatttggcaagaaggggcatggtatatagttgaaactctaagaaggcacagagagcaaggaagaatatggtctcagataaagctgaagatctgggcaaaagccagaacccacaaggccctgtaaaccacactaaaagagttatttatcccaagaggtattattagattttatatgaggagaataacatgatcagacccgtatttgaatgaagatcattatggctgcagtataaaggaacataagagtggacaggggtatacttgttaggatgaactgcaatggtcctgaggaaaggttatgtgaacttggactaagatagggagataaagagaaatagatcacgtctgtaatcccagcactttgggaggccaaggcaggtggatcagaaggtcaggagatcgagaccatcctggccaacatggtgaaaccctgtctctactaaaaatacaaaaattagctgggcttggtggcacgtgcctgtaatcccagctactcggaggctgaggcaggagaaccacttgaaccagggagtcggaggttgcagtgagccgagatcacaccactgcactacagtctggcgacagagtggagttaaaaaaagagagagaaatagaaagacttaagagatatctatcttatatatagaaaaaaggagaaaagtttttaaaaagatgtatctaagactttaaataagggaactattgcatgaggaatagagaagtagagttgccaaggatgactctcaggtttctgcctcacccttctgtctgttctaggtgccaagcactgtgataaatgtttatatttaattcctataacaattctataaaattagtatcatttgtccaatatacctccccaaataaagcaggagacctggagacccaggccagaactccataagccaaaaagcaaggtactgcagctgtttcatatatgatttctgttgttcctggtagggcatgccctaaaggcttaagaatagtctttaaaatccccattttacattttcataccccatcatatccttccactcatgcctcaccccagagcacaccatacctgacttcctaagagaactccatgtggcctgattctatctccagaccacatatcagcaaccaaaagcccactacaaaaccaccattaataaatgacaaaaactagtggaagcccactcaaaaagatgtcatgtctgattatttttctgccatatttacacaaactgttcctttggcttaagatgtttttctcactctttgctaccaccttcaactacttaattcatactgatccttcaagatttagctcagacatcagcccctctgataatctttccctaaggcttccagtatgtattagcagcctatgtacactctattatagtatttgccatggagcattttaattttcggtttacttgactctttccacacttgaacgtgagctccctcaaaaaaaaaaaaaaaagaagtgtgttttattcatctttgcatcacctagcacagttccaggcatagtagatattaaatgactgactatctgattcattaagtgaatgaatcaggctgggcccagtggctcatgcctgtaattccagctactcagcaggctgaggcaggaggatcacttgcttccagaagtttgagaccagcctaggaaacatagcaagacctcatctctacaaaataaaaattagcctggcatgatggtgcacacctatagtcctagctattcaggaagatgaggtgggaggattattgagcctaggaggtcaatattacagcaagctatgatcacaacaccgcactacagcctgggcaacagagtgagacactgtctctaaaaataataaaataattgtagggtccagccccacagggtcagtgggttttctccccgtgtgcggagacgagagagtgtagaaataaagacacaagacaaagagataaaagaaaagacagctgggcccggggtaccactaccaccaagatgcggagactggtagtggccccgaatgccaggttgcgctgatatttattggatacaaaacaaaggggcagggtaaggagtgtgagccatctccattgataggtaaggtcacatgggttacgtgtccactggacagggggcccttccctgcctggcagccaaggcagagagagacagacagacagacagacagcttacgccattatttctgcttttagtactttcactaatttgctactgctatctaaaaggcagagccaggtgtacaggatggaacatgaaggcagactaggagtgtgaccactgaagcacaacaccacagggagacggttaggcctccggataactgcgggcaggcctgacatcagtcaggccctccgtcaggccctccacaagaggtggaggagtagagtcttctctaaactcccccggggaaagggagactgcctttcccagtctgctaagtagcgggtgtttttccttgacactgacgctaccgctagaccacggtctgcttggcaacagacatcttcccagacgctggcattaccggtagaccaaggagccctctggtggccctgtccaggcataacagaaggctcacactcctgtcttctggtcatttctcactatgtcccctcagctcctatctctgtatggcctgatttttcctaggttatgattgtagagcgaggattattataatattgaaataaagagtaattgctacaaactaatgattaattatattcatatataatcatatcaaagatctatatctagtataactatacttattttacatattttattatactggaacagctcgtgccctcagtctcttgcctcggcacctggttggcttgccgcccacaataataaaacaaatgaatcaatcaattaatcactaattatgataggacatcctctggttacaagtaaacatgtaatacaaaacacctgctaaatatttttatcatgtttaaagcaatccacattgtgcagagagcaactgaagggcatagcaaaattgtttaatcaaagctacataataaaattgagaattcaagaaatttaggtcttctaacttgtggagtcaatgctcttgatactacaagaaactacttctccacaaagaccagaaatgacttggaaaagagatgtaaggctgaattttttaaaattcattttattctttaaccaaacataccaaactataacaattttagaaacctctcatttaatttttctagactatttcttactatagacaccagtaaacagtgtcaatggcaaaaggtaagaatcaagagaaaaaaggagaagcaaaggacagatcacaaaattgatatccggaaaaaaatgtataaatatatgcacatatatatggacatatatatctcaatgcaaataactcactgtcaatataggtatgttttgtcacttcttctaaaatttcacggtttatagggatacccatgctatccaaaacagcaaacacgtcatcagttgaaactcgaccaccttttatcctacagaaaatcttcaaggcatcctggaatgctgcaaaaaagaaattattataccatgagaatcaacagcttttcttggaaaagcagttgattttgtgtcaatagcctactaagggaaaataactttgtataagcacagggttttataaatatttatctacaagcaaaccactgatataaaataactttataatagtggttaaaacattggtcttttatttctccataggaatttcatattcttatgttaacaatccttagcacataaaatgaattgaaaagaacctagtcagaaggaaatattcagcatggccctgactagcgaaccaaatctgggggtccccaagacatctacttttgaatgtcagagtctataattttaaaacaatttaactaaaataaattaaacactaaatcactttatcattttctaaaatatttagagtcacatcagagagctcagtatatttttaattttaaaaagaaaatattcagataaattataattttccacaaaaaaaacttccttaaaaattaaacagattgctgggaaaactggctagccatttgtagaaagctgaaactggatcccttccttacaccttatataaaaattaattcaagatggattaaagacttaaacgttagacctaaaaccataaaaaccctagaagaaaacctaggcattaccattcaggacataggcatgggcgaggacttcatgtctaaaacaccaaaagcaatggcaacaaaagccaaaattgacaaataggatctaattaaactaaagagcttctgcacagcaaaagaaactaccatcagagtgaacaggcaactacaaaatgggagaaaattttcgcaacctattcatctgacaaagggctaatatccagaatctacaatgaactcaaacaaatttacaagaaaaaaataaacaaccccatcaaaaagtgggcaaaggatatgaacagacacttctcaaaagaagacatttatgcagccaaaagacacatgaaaaaatgctcataatcactggccatcagagaaatgcaaatcaaaaccacaatgagataccatctcacaccagttagaatggcgatcattaaaaagtcaggaaacaacaggtgctggagaggatgtggagaaataggaacacttttacactgttggtgggactgtaaactagttcaatcattgtggaagtcagtgtggcaattcctcagggatctagaactagaaataccatttgacccagccatcccatttctgggtatatacccaaaggactataaatcatgctgctataaagacacatgcacatgtttgtttattgcggcactattcacaatagcaaagacctggaaccaacccaaatgtccaacaatgatagactggattaagaaaatgtggcacatatacaccctggaatactatgcagccataaaaaatgatgagttcatgtcctttgtagggacatggatgaaattggaaatcatcattctcagtaaactatcgcaaggacaaaaaaccaaacaccgcatgttctcactcatagatgggaattgaacaatgagaacacatggacacaggaaggggaacatcacactctggggactgttgtggggtggggggaggggggagggacagcattaggagatatacctaatgctaaatgacgagttaatgggtgcagcacaccagcatggcacatgtatacatatgtaactaacctgcacattgtacacatgtaccctaaaacttaaagtataataataataaaaaaaaaattgaaaaaaaaattaaacagattgaaagccgtgtccaactgctaaatttatatcctccctgaccactacaccccttaattagccttgacaaaaaaaaaaaaaaacacaattcccattatcaatttcagacggaaaatcatttatagtcagactagattttcttgaaattcatcatataataaactaatgattactaagttctttgataagcacagtcaaggaggaaaaactgggcattatttgttcattcgattagtcttttttttaattaattaattttcttttttaaagacagggtatctctctgtagcccaggctggaatgcaatcacacgatctcggcttactgcaacctctgcctccccagctcaagcgattctcccacctcagcctgttgagtagctgggactacagacacgtaccactatgccccgctaatttctttgtatttttgtagagatggatttttgccatgttgcccaggctggtctcgaactcctgggcttaagtgatccacccgccttggcctcccaaagtgctgggactacaggcatgagccaccatgcctggtctcaactagtcattattgatcaagtgaacaaaaatagcagaggaagggacctccagaaaccctctgctccataaaagcaatgagaactctggcaaaaattatcagaaccaacttgtttcaaaactctgaaaataagccaaaggcttgcagctatccgaggaatttcttcaagaaaaatgactgagtctcaataagaacagtgaggtttgtggcatttaaacttgccctattcccatctacccatctccaggttccctggagcattgaaaaccagtactccacaatcatgatgaaaatgtatgtgtgtactattgaggtgagaaaggcctctttaagcacaactcaaaactcagaagacataaagaaaaaataataaattttgtgataaaatgtaacagtcccattccaaaaaccaaagacaccagttcaaaattaaaagagaaacaacagactagaagaaaacatttgtaacatacataacaaaggattaatagccagaatatgaaaactcctacaaatcaatgagatgaacaacccagttttttaaatgaaaagtatatgtgaaaaggcaattcatagaaaaaatatataaatgaccagtaattatattaaaagattactaatttcataattgagaaatataattaaacaagatagttcctgcaaaacaaggtggcaaaatttctttttctcttaagaaaaagatatttgcatttttcccttttatttttctctagggagtctcttgatttctaactgtatgcttgatctttttactagtttctatgagacctaggtcctttgcttccactctgcctagtaattgataactcattttgccttgacaaaacataaattatatgtatgtatgtgcatataaaaagaattctcaggtcagtattaaactgcagcaatcttgggttaaagaaggtctttcacatctttatacacatatattgcttggatattttattacaacaatatattcaagaattatgtgtgttcttttaaaaggaacaaaagaaacctgagagttcttgattagtctcagaacactgtccacaaacagaaaataaggtcaaaataggaaaccaggacttgaaaaatcaaggaatatagggaagtaaataagctattctaagttgtgattcaaaaagtggtctctacacgctgctctgtctgtccgagtgaaagttgcaagttagtcctgcctcctatccatcatttttccctactgtctggaactcaacttacatttttttctgactatagatttatatgtgtgtttggactcctaagtactgaccacagatacatacatataatttatgttttgtagcagggcacagtggctcacgcctgtaatcccagaactttgggaggccgaggcaggtggatcacctgaggttaggagttcgagaccagcctggccaacatggtgaaatcccacttctatgaaaaatacaaaaattagctgggcgtggtggtgtgcgcttgtaatcccagctactcaggaggctgaggcaggagaattgcttgaaccagggaggcagaggttgcagtgagcgagatcgcgccattgcactccagcctggagtataaaatagtaatttatgctttgtcaaggcaaaatgaattatcaaaacgtcaaaataggaaaccaggacttgaaaaatcaagaaatacaggaaagtaaataagctattctaagttgtgatttaaaaagtagtcagttagtagacactcacatcgtgaacttttgctccaagaactactgcaggaacatatcaggaaagccaagagaatccaaagaccccttcaaggagatggatgcccttgcaggctctgtgggacaggcaagtaactgtgagtcggcttgctttctcagtggggaggcttgtagcctgggacaagctctcatccctgctcaccgcctgcctggaaataaactcggtgctacaggtgaagcgcagtgggagtgaaaccagtctttcagactgtgggctgcgtggaagctgggtgaggcctatcgctgctggctttcccccacttccctggcgacctgtcaggcagcagaggcagccataatcctcccaggaacataactccattggcctgggaaccacaccttcaccccgacagcagctgcagcaaggcccacccaaacagagtttgagctcagacatgcctaacctgccccacctgatggtctttctctaccaatcctggtagcagaagacaaagaacataatctcttgagagctctatggccctgcccaccacctgaccctagggcaagcttgtaatctccctatactactgcagctgatgtgctcttgaaagtgccacctcctggctggaggccaaccagcacactaaacaaaaatacaaccaaggaccctaatagagtccacttcactcccctgctacctccattggtgcaggtgctggtattcacggctgagagacctgaagatggaatacatcacaggactctttgcagacactctccagtaccagcctggagcctggtagctccactgggtggctagatccaaaagagaaataacaattactgcagtttggctctcaggaagccccttgtccaggaagccctatgtctcaggaagcccctaggggaaggagaaaagcaccaaatcaagggagcaccctgaggaacaaaagaatctgaacagcagcccttgagtcccagagcttccctctgatatagtctacccaaatgagaaggaatcagaaaaacaattctggtaatatgacaaaacaacgttcttttacatctccagaagatcacactcaaaagcttagcagcaatggatccaaatcaagatgaaatctctgaattgccagaaaaataattcagaaggtcaattattaggctaatcaaggaggcaccagagaaaggtgaagtctaacttaaaaaaaaaaagatacaggatatgtatgggaaaatctccagtgaaataacataaataaaaaacaatcataacttctggaaatgaaggacacacttaaagaaacgcaaaatgtgctggaaagtctcagtaatagaatcaaataagtagaagaaaaaacttcagagcatgaagaaaaggctttctaattaacccgaggcaacaaaaacaaagaagaaagcattttttaaaatgaatgcacccagcactgctgggtgcagtggctcatgccagtaatcccagcactttgggaggccaaggcaggcggatcatgaggtcaagcaatcgaggccatcctggccaacctggtgaaaccccgtctctactaaaaatacaaaaattagctgggtttggtggcgcgcgactgtagtcccagctattcgggaggctgaggtagaagaatcacttgaacctgggaggcagaggttgcagtaagccgagatcgcatcactgcactccagcctggtgacagagcgagactctgtctcaaaaaaaaaaaaaaaaaaaaatgaacaaagcctccaggaagtttgggattacgttaaatgaccaagcctaagaataatcggtgtttccaaagcagaagagaaatctgaaagtttgttaaaacatatttgagggaataatcgagagaaacttccccagccttgtcagagatctagacatccaaatacaaaaagctcaaagaacacctgagaaattcatcgcaaaaagatcattgccttggcacatagtcatcaggttatctaaagtcaagatgaaggacagaatcttaagagctgtgtggcaaaagcatcaggtaacctataaaggaaaacctatcagattaacagcagatttctcagcagaaaccctacaagctagaaaggattgggtcctatctttagcctccttaaacaaaacaattatcagccaagaattttgtatccagtgaaactgagcttcataaatgaaggaaaaatacagtctttttcaaacaaatgctgagagaatttgccattaccaaaccagcactactgactgctaaaagaactgctaaaaggagctctaaatcttgaaacaaatcctcaaaatacaccaaaatagaatctccttaaagcataaatttcacaggacctataaaacaataacacaagaaaaaaacacaagatattctgtcaacaaatagcacaatgaatagaatagtacctcacatctcaacactaacattgaatgtaaatgatttaaatgctccacttaaaagacagagaatggcagaatggataagaattcaccaaccaagtatctgctgtcttcaagagactcacttgacacttaaggactcactcacataaacctaaggtaaaggggtggaaaaagatacaccatgcaaatggacaccaaaagcaagcaggagtagctattcttgtatcagacaaaacaaacttaaagcaatagcagtttaaaaaggcaaagagggacattatataataataggactagtccaacaggaaaatatcgtaatcctaaacatatatgcacctaacactggagctcccaaatttataaaacagttactactagacctaagaaatgagacagacagcaacagtagtagggggcttcaatactcaactgacagcattagacaggtcatcaagacagaaagtcaacaaagaaacaatggacttaaactatactctaaaaaaaattgatctaacagaaatttacagaacattctacccaataaatgcagactatgaattctattcatcagcacatggaacatcctccaagatagaccatatggtaggccacaaaacaagcctcaacaaatttaagaaaattaaaattacagcaagtactcttgctacagtgaaataaactggaaatcaactccaaaaggaaccctcaaaactatgcaaatacagggaaattaaataatctgctcctgaataatcactgggtcaacaatgaaatcaagatggaaatttaaaaaatctttgaactgaacaataatagtgacacaacctatcaaaacctctgggatacagcaaaagcagtattaagaggaaagttaatagcataaaatgactacatcaaaaagtctgaaagagcacaaattggcaatctaaggtcacacctcaaggtactagagaaacaagaacaaaccaaacccaaacccagcagaagaaaagaaataaccaagatcagagaagaactacatgaaactgaaacaagaaaaaaaatgtaagtcaaaaaccaagtagataaaagagaaccaggaaaatcctaatgccatggagtctatcaaaatgccaaaaagaaaaagcaagccaagcatcatatctatattgttcactgctgcatatataggcatattaatgtttattacataaatgagtaaataagtattgaagagtttttattgccctttacttgctaatccagttctataaagactatcacattcacatatccttgattctaacaaaataaaatctgggctgggtgcagtggctcacacctgtaattccaacactttgggagaccaaggcaggcggatcacttgaggtcaggagttcgacatcagcctggccaacatggtaaaaccccatctctactaaaaatacaaaaatttagccaggcatggtggtgcatgcctgtagtaccagttacttgggaggctgaggcaggagaatcccttgaacccgggaggcagaggttgcagtgagccaagattgtgtcactgcactccagcctgcatgacacagcaagactccatctcaaaaaataaaaaaaaataataaataaataaataaatatacaatctgattcactataaaaggaacatacctcaaaataataaaggccatacatgacaaacccacagccaacatcctactgaatggggaaatgtttaaagcattcctcctaagaaccaaaacaaaacaaggatgcctactttcaccactcctattgaatatattactggaagccctagccagagcaatcaggcaagagaaaaaaaagtaacaggcatccaagttggaaaagaggaagtcaaattatgtctgtttgttgatgatataatcttatactgagaaaaccctaaagactcctcccaaaaaaccctgagatttgataaacaaatttggtaatgtttaagtagataaaatcaacatacaaaaatcggtggcatttctatacactagtatcaagctgagaaccaatcaagaaggcaatgccatttagcttagctacaaaaaacaaagtacctaggaatacatttaaccaaagaggtgaaagatctctacaaggaaaactacaaaacagtgatgaaataaactatagagaacacaaacaaatggaaaaacatcccatgctcatggatcaaaaacttaatatcattaaaatgaccatactgcccaaagcaatctacagattcagtgcaatctccatcaaaataccaatgtcatttttcacagaaatagaaaaaataatcttaaaatttacatggaactaaaggagcccaaatagccaatgtaatcctaaacaaaagaacaaagctggagacatcacattacctgacatcaaattatactataatagtaaccaaaacagcatggtactgctataaaagtagaaacataaatcagtggaacagaaaacagaacccagaaatgaagcttcatatctatagccacctgatctttgacaaagttgacaaaaacatacactggtgaaaggacactcttttcaataaatggtaaagggaaaattggattgccattcacagaagaatgaaactggacccctatctcccaccatatacaaaatcaactcaagatggatataaacttaaatgtaatacttgaagctttaagaatactagatgaggccgggcgtggtggctcgcgcctgtaatcccagcactttgggaggccgaggtgggaggatcatgaggtcaggagatcgagaccatcctggctaacacggtgaaaccccgtctctactaaaaatacaaaaaaattagccaggcgtggtggcgggcacctgtagtcccagctacatgggaggctgaggcaggagaatggtgtgaacccaggaggcagagcttgcagtgagccaagatcgcaccactgcactccagcctggacaacagagcgagactccatctaaaaaaaaaaaaaaaaaaaaactacatgaaaacccaaggaaaactcttactgacattggtctaggcaaagaattcatgactaagaactcgaaagcacaagcaacaacaacaaaaaaagacaaatgagacaactaaactaaaaagcttctgcacagcaaaagaaataatcaacagaatgaacagacaacttgaagaataggagaaaatatttgcaaactatgcatccaacaaggactgatatccagaatgtaccaagaactcaaacagatcaaagacaacaaaagcaacaaataatcctgttaaaaagtgggcaaatgacatgaatagacatttttcaaaagaagatatataaatggccaaacgagcattatgaaaaaatggaaagcagtgtggagatttctcaaagaactaaaaatagaactactgtatgatccaacaattccactactaggtatatatgcccaaaggaaaagaaaccattatctcaaaaagatacctacactcatatgtttatcacagcacaatccacaatagcaaagacataaaatcaacctaagtgtccatcaatggatgactggataaagaaaacgtggcgcgcgcgcgcgcgcgcgcgcgcacacacacacacacacacacacacagtggaatactagtcagccacagaaaagaatgaaataacatattttacagcaacatggatgaaactattaactatctgactttctgtttctgacttgtttcacttaagataatgaaagccatttataggtaggagccaaatttataggtgggagccaaatgtgtacacatggacatagagcatgaaataatagttactggagacttggaagtgtgggaagggggtgaaggatgaaaaattacttaataagtaaaatatataactattcgaataatggttacactaaaagccagactttaccaggatgcaatatatcttgtaacaaaactgcatttgcaccccttaaatttatacaaataaaaaataaaattatataattccaaggaccgagcataagaacttgatatcgcctaatggaggaagagaagaattgctaacatcaggtcatgaacaccacagatttcatgtttttggaggtactgtttctaccattaatacgaataccctttccaaccactttatttataatgtataggtaatgtaaactaaaggttactaggagacccataagtatctgaaatttttaggaagagatacaaacaagactcctggcaaaaggaagaaagtactgttaaggatgaagaagaaaacagatgagagatttcaacagaaaaaaaaacacacacacacacacaaacaaaggcgtgggagtaataattatattggcatgtatggagatttatgactaacgagtatgtggttcttgcctgggaaaggttctgtgataaaggtaagagtggtgaacaaaattatgaaggggtgaggaggctaagcatgagagtttggcctctatagattcatttgataataggaagagcatctaaattcttgagcaggaaaatgacatggtgaaaatagtattttaagagaattagtctagcagttaatgtgcaggaaaactagagatcagagatagaatgtttgaatattggggcagtataatccaggttttgtaatgccttttatgacaaaattcactcctcatttttctcagcccacactagtgggagatttgtaaaatataaattaattcatatataaaataccacccctcccaaccccaaaatcagttacaaaagtattatcttctatacttttgaagaagtcttttttacctggattctgagagaccaaataagaaacatcaggccgggcacggtggctcacacctgtaatcccagcactttgggaggccgaggcgggtggatcatgaggtcaagagatcgagaccatcctggctaacaaggtgaaaccccgtctctactaaaaatacaaaaaattagccaggcgcggtggcgggcacctgtagtcccagctactcgggaggctgaggcaggagaatggcgtgaacccgggaagcggagcttgcagtgagccgagattgcgccactgcagtccgcagtccagcctgggcgacagagcgagactccgtctcaaaaaaaaaaaaaaaaaaaaaaaaaagaaacatcagccacagctttaaggaaatttgaaaaatccagcattccattaactataaaaatggttccaaaacagaagtgaaaaaaactccatcagcaaacattattagcaaactcactaagaacataagataaaagtggcaactaaaaatgtaaatagaattaactaatgacattagaatactattatctatacacagagcagtcgacattatatatagaatgtaaaaagaatatttaccagaaaaaaatttacatattgtaattaggtagtaaatagtgttccagcagtaataagaatgctatgggactagtactgtagatactgcagtgctctttgctcaagactaatttttatatttgtagttcttcaagattcttcaagttaaataactatgaattcatcttctcctgtcattaaataaacgagcccaactttgacagggtttatttacatcagtgatgttatctatgtcacgaagaaaacaagtataaatctatatttcaatttaatgtcatctgagcagaaatagcctatagaggaatacttcagtgcttccaattgtctgcagaggaaatgacaaggcttggttgttctcacttccataccacagaagcactttctccaatactgaaaagtctatcaagttgtctgtctccacttcttcagtgtaacaacttgagagtgggttctcctttctttcaaaaacagtgaaacatctgtccaaattttaatgaactactttgacttgttttctgatattgttgtgactttgggttggcaaagatcttttagataagatatcaaaagcaattcatgaaagaaaaaattgcagactggacttcatcaaaagtatgaatttttccttttctaaaaacattcttaagagaataaaaagacaagcaacagaatggaataaaatatctacgaatcacatatccaataaaggacttatattcagaatatataaagaatctcaaaatacaataagaacacaatttttcaatgggcaaaaaatatacaaatggcaaacaagcacatgaaaagatattcaacattatttaatcattcaggaaatgcaaattaaaaccacaatcagataataaccgtatatctattagaacaaccataatttttaaaggcgatcaattcaagggtggcaagagcaagagcatacaaaaaaagcagtatacaacaatatgaataaatcttagtcatataatattaagggaaaaaaacaaaagattatatacataatgaaaaactgtttactaaagttttttaaacaactaaaatttttgaactattttacaaaaatacctatccataacaataatactatttaaacagaaaaataagagaataatgaatataggattcaaggtaattcttacctcaggttggggaaaacagaataataggttgcttaggaaagtttacagttggatgtaaattattgacaaggtcctactttttattttgggtggttgggtcaagtatttattacattatttaaattacgtaactaaataagattagaccatgcgtggaacaataatgagaatatgccataatccagtctagtaattaatcaatccaattacataaacctgaggccaattttcaatatcattattgtaagtaatgttcttgtaacatgtaaaaatgttttgtaacatacaatatgaccaaaaatgatgtttttacaatatattttaaggtttagctttcctatcatttgtaattaatctgacaaacatatttatgattgcagacccttaaactaatactgaaaagataaaacttaccatcaatatcaacagtctttagtgcctgtcgcatttctaaatcacttatagaaattctcaagatgcaaaggatcactggaagatcattcacataaatcttaccacttcgaattttactaaaaattttacaggctttatgaagtgctgcacacacataacaaaacatttagttagttaatcaaaaagaataattatccttattccccccactctcaaaaaaataataatcactaaaaagggagccaatctgtgttttcagcctttcaaacttgtttcttttttaccccaccctcttcaatcttttaatattcaaatctttcaacctgtttcctaaagaactttcagaaactgtcagacaagtcacacaagggcacataggcaaaggcttccacaacttgccctaggaatggtaaatttttcctctgtgttcccatagcacttactatgtatctcagtgaaagcccttggtattatgattgcttgcatgtcaatatccctcactaaactgtcagcttctatggagcaagattttttcattcttctgtttctagtgcctaattaagaaattctcaaaaaaatgtctattgaactgaattttttggttcagtggatactacactttattttcagaaaagaggcaattgatgatagtgctatttttgtttgtctttttagagccagagtttctctgttgctcaggctggaatgcagtagtgcaatcatggctcactgcagtctcaaactcctgtcgcgaaatcctgggcttaaacaatcctcctacctcagcctctccagtagctaggactacagctgtgtgccaacatgcccaactaattttttgtttttgttattttttgtagagatgggatctcactatattgcccaggctggtcttgaactcctagtctcaaatgatcctcccacattggccttccgcagtgctgggaatacaggcatgagccacctcacctagccctaacagtgataaatacaaaataatgactaaagagttgataataatggctttaataaaataagttttagtagaattttggaggtggaagccagatttccatgaaatgggaagtgagaaaattcagcaactaatgaaaacaactccttcaaaaggcttctctgaaaaaatattgagtataaaattagcaaagcataggccttgagaaagcagaagaaaatcaagaaatgaaaggattagtctggtgaaagggcaccttttccaatgagacaagatgaaaggatatgaatgttgtttgtaggtaagaatatcaaggagtttaggaagcttcccaacagcccttactaactctctatgaaaaagcaaagccacatgatccagtaatcccacttctgggtatttatccaaaagaattaaaaccaggattttgaagagacagtagtactcccctgttcactgcagtactattcacaatagccaacctatggaaaacaatctaaatatctgtggaaacaacctaaatgtcagataaatgggggggggggtaaagtacgttatatacatatgacagaatatcaatcagcctttaaaaagaagaaaatcctgtaatatgtaataacatgaatgaatatgaaggacattatgctaagtgaaataagccagttacagaaggacaaatactacagaattccaattatataaagcatctaaaatagtcaaacttatggaacaaagaatagaattgtagttgcctggagcagggggtatgaggaaatagtgagttgctaatcagtgagtataaaatttcagttacacaagatgaataagttctatagaaatactgtacaatattgtgcctatagataagaataacttacatttttaaaatctgttaagagggtagatctcatgttaaatatttttaccacaataaaatttttttcaaaagaaataggggagaaaagattcagtttcatagatttcagactagcaagttttaattttattttaattaagtaaaacatttttaaatgtttaaagttggataggtgacataattgagtatttgaggagagtagtgaaggtttggaatagataccaaaggaaacaggagagatcacaccaaaacttaaagggaataccaactggtgctaagggcagctgaggttggaaatcatacaatcatagtggcaccaaatggagaggtcaaggaaataaaattctaaataaaaagagctggaagtataagagattgtgagtgaagaataagacgttgacgtctgagattttcacataatgacaatgtgtaatttgtggccatcagtgttggtcaggagaatcaaggtaaaattattggttttgaacgtgtgaagctccagaagtatgagtcacccatttggacactaagatacacaatatgacaaccagagttaaggtaaaaggaaaactatgtgaaattattccataagtataaaggagaaacccaagatacgggagaggtcagtgtcatgaaggagtgaagggtagtataagccttaatactaagataccaaagactaaattccagtgatatcagtgactccagcacttactaatttatccatgggatgtaatatgcagacatttttccaaaaaatacatttgaactagtataagctacatattatattttccctatcttaccaatacaaccaaagatatttatggattaaactatctacttttgcttcctcacagcccgcagcatttgccataccatgtattatcagttgataccataagccattaggagtagatgaagaggcactaactgctgaaacaattcctaaaaagcacataaccaggaaatgtattcaagaaattttagaacctcttattaccacttaattcttttgagtgtaaatatccatgggttacttcatcatataatgtcatgtagaggttagacagcatttccttttccctgtcaaagaaacagccatattagaaagtggcaatgaaaatatgcaaattccattttaaaatattagcaaacttaccaatagtctgagattcataagaacctttcttgaagaactgtccaagttatggaaaattccatattcttcacttcagaagtctcaccttatttcttttcgagatatttttctataaagcagaattcaccctagtctgcaaatagtgcccatgacctactatccttcgactgtggtccaatttttcctattcttaatccaagtcacagcaaatttttaagaaagttattataataaagcaaacaagaacatctttaaacagccaaagaatctcagattccatcacctatcaggaaaaatgtctggaaaagatgatttatctaatactataacatgtaaattgctgaaatcatataatgttagtgttggaagacatcttaagagttcatttagtacaagatccttatacagatgtggaaagtgatgcccagagatgtaaattttacaaaagtctaagcatgttaggtcaatcggactcaaatctaagtcttccaattccatatacagtgctcttatctctacacaatcctaacagcataattagcataaactacttcatattctttatgtggaagggataaatgattctggagagaaacacccaagtctgaacccaacatttaaaaaatagagtacaaggatttaaataccgagtaattgcagaagatgtacaaagaggtgatgaagtcttgtgaacgctgtactgattcggcaacttgcataaagagttttctttccttgtcaccttctcctttgacagcttcagaaaaggagggataatctagagccaaatgcaagtatgttggtgcctgaggtgagtgacactggtaattcagcattcttggatgatacaactcttaaaagataattaatcataccttggctcctcattaattatgcttctggtgtaaaattgccttttgtaattaaattacatttaatataaactaaaattttaataaactatgcaatgttctcttgcaaagccatggttttcttaagtatgcagttaatcatgtcattaatacttggtaactatatagtaatgggttttacaaagcagggaaaacctatggtatagagagaacaagaagactcagccaccagactctaggctacatataaaggctttgacttaagtgcaatgtggagaatcaacacagttattcaaatgatacaggtaattttgttttcgattatccctatcattgagtaaattatccacttaagattgcatgtataaacatgattccaaaaaggcaagcactaggtggataggaaagtagcactttagaaaaataagaattctaattacaggtgtcttcacttttacatggaaccctgagcattgagttttaatgaccatgcaagatgtggaaaaaagactctcacgttacacaagattgacaggaattggtactgagatgccatacggaaccaaaatcttcaaaagacaatgttttcagcaagagtggggaaggaaaaaacttattccccagtgaaaaagtatgattaaaacatgtctctatcccagctccaggttagaaaaaaagaaagactattcctcctgattagtcataatcataactctacatacatgagtttggaactcaaatctacactaaatatatgggccagggaaacagaaaccaaaaaattcatttaaaatgacctcagatttgtaacacttctgaagtgcatggcaaagacaaaagcaaattttctttttaaaaattctcttgaagaagggcaaactgaagattcccacagatttagatcaactatatatgaaagaatgtacaaaatatatataacacccaaagaacaagttaacatgagtgagaatcagacaaaacaacaaacacaacatttagatcccccaagaatttcatacagtgaattgatcagataccaatcttgaaataactatagaatatgagcaaaaaacatgacacagggcatattttaagaaccatcaaataaaatttctggaggtaaaaaatagaatcactgaaattaaaatctcagaggaaaggttaaactgtagattagattcagctagataaagaataagtgaactagaaagtagatggggagaaattacaaagaacaaaatagagagacagaatagacaaaaaatatgaagcaatattaaagaatatagaaaacaggatgacaaaatctaatacacatctaacagaagatacaaagggacagtaaagagattgaaagaggggaaatatctaaaagataacatattagaattttccagaattgaagaaaggcatgcattctcagatttaagaagcacagcaaatactaagacagaggggaaaaaaggatatatacctctaagtatatcatagtgagtgactacacaaaaagatattccatgttctaatatctgaaacctgtgaatgtcaccttatttggagaaaatgtatttgcagatgtaatcaagttaagatcttgaaatgaaatatacaatgacagacgtgcttgtaagagaaaggaaggagatgagatacagacacaggaaaagaggccatgtgaagactcatgggaagatggaggcagagattggagttatgctgccacaaaccaaagaacacctagggttcctgttaaaaaagcaaaaatgttagcagagagcacagtaaaaaagacaaaaaataagtttaatagggaaaaaacacaaatttttcataaattcctgaaaagattccttgttctattttttttttaaggagaagaaaaaggagaattaagaacagaagaggagaagcaagaccaggtagtgatatttaagactgtgacatttcaacacttggactaaaaaatttaagggaatgtttgagggctaaggaaaatatttgaaggtaaaagaaaaatttccaaatctttatttacctcagttcttttactgtgctgttgtacttgtaaactctttctcccaacttttttttctcctgaaaaatcagaggacttttcttctccacaaaagattattgatgtttcaaatctaaatgacacagaaattggaatcattcttgaatttctttttacttattcttttcaacttttaattatggaaattttctaacatatacaaaagtatacagaatcccatcacccagtttcaacagtggtcaatcctattccatctatatcccatccctgttcccatcccttattatttttgaaataaatcacagtatattatttccatctgtaaagattttaatagaaatctctacaaggtgtctttttttgtagagattgggctgggtacggaggtgcacacctgtaatcccagaactttgggaggccaaggtgggcagattgcttgaggtcagaagttcaagacgagcctggcaaacatggtgaaaaaccccatctctactaaaaataccaaaaaaatagacagacgttgtgacacatgcctgtagtcccagctactcaggaggctgaggcataaaatcgcttgaacctgggaagtgagctgagattgagccactgcactccagcctgggtgacacagcaagactccatctcaaaaacaaaacaaaacaaaaaacaccatatgacagctaaaaattaacaatttcttaatatcatcaaatatacaggcaccattcacatttccagttgtctcgtaaatgtcataaaattttttaacattttgcatcaggactcaataaaatcccagcatcataattgactgaaatgtctttttaacttcttttcatctataagttctccttctataccttttattatcattataattattattactaggtcattcatcctgtagattttccacagtcaggattttcctgattgtatcaccacggttgtaggattctagaggcttgaacatattaacattcaatagttgagggagatgcaaaaccactctctaggtggtgacgttattccatcaggaagcacataatgtccaattggctatttgtggtattagcagctacttatacataatagatccagtaaatcatgagagactggctgggtatggtagctcatgcctgtaatcacagcactttgggaagccaaggtgggcaaatcacctgaggttgggagttcgggactagcctggacaatatgatgaaaccccgtctctactaaaaaaaaaaaaaaaaaaaaaaaaaaaaattagccaggtgtggtggtgcacgcctgtagttccagctactcaggaggctgaggcaggagaattgcttgaacctgggaggcagaggttgcgagccaagatcgcatcactgcactccagcctgggtgacagggcaagactctgtctcaaaaataaataaataaaaataaaaataaaaaatcatgagagactgcaaagtggttatattataaatctatcattccttcaatcattagctagaatatttctttttttgtatgtgtagagatggaatcttgctaagttgcccagactggagtacagtgactattcacaggtgtgattataatagacactacagtttcaaactcccaggctcaagtgattgccccacctcagcctcctgagtactgaattataggcacacaccacaatgcctggctgctagaatatttctacaaatagacactttctctcatgtactattgggttgcctagtggtaccagttcatatagaaaggcaagatatagacagattcaactgactttaaaaaaaaaaaagaacaagaaagaaagaaaggtaagataattgctctattgttttcctttatttaccacttttcataacaaagacttggctcacttataacctctaaaaatgacaaaataattttataccattttgaacgcatagacttaaatatatttgatgcagtttaattccctgaaattattatacttattgatgctctaattttctcatcttttataggaaaaggtgggagactcttccagtaggctcttgagtccttctgatgaatccctgatagtagtcttttttattaatagtttccttatctccggaagacaagatgttccaggcttactttacatttcctttcacagacatgcaatcagcatttctctaaacagccttttaataagaaatggtatttcaagattaaagtttgggcactagaagctgaacttctttttaatcaacattcttctttcttattgtttggttttctcttatttctcctttttcctcttcttattggactgtcaaaaaccttttttttttttttttgagatggagtctcactctgttgcccaggctaaaagcacagtggtacgatctcaagacctttcataacataaacattccacaaaccaggggtccccaaactctggcccatgaaccaaaactcgtctgcacagtaggaggtaagtggctggcgagtaagcattaccacctgagctccacctcctgtcagatcagcagcggcattagattctcatagggacacaaatcctattgtgaactgtgcatgcaagggatctaggttttgcctccttatgagaaactaatgcctgatgatcttctgaggtggaacagtttcatccagaaaccacccctgcctcctccccatcccctcgtccatggaaaaattatctcccattaaactggtccctagtgccaaaaagtctggagaccactgccataaactacacaacaataagataaaatgtaattatgaattacatttgaattaaattttagaagagaagacacatactcttagaaagtgcttcaagtaatctagggtagacttaaatttcaagaacaacccatcaggacagtgactaactagattatatctacaacagcttcaggtgaactcagccctaagcaaaactgtgacataaaaaaatatattataattcatgccactccctttctttagcaagtaccttggcctttttttccaattttatttatttattttattttaaattgatagacaaaattatatatatttattgtttcttaaatttatttttaattgacaaataaaattgtatgtatttatggtgtaccctgctcttttttactgacttatttctccaagaaaaagtatcttgcttttttgacacactatccctttaaatccaatctcccaaattcataccctgtgaacccccatactttgctcttcacttccctgaagctgccatatgattagatccctctgcagtcctctagtctcaaagcaaggactttcaactattttgcctatgacccacagtcaaaagtaaattttctattgaggtacaatatacatatacagagataagaggtgcaatagaaagcaagggagagagaggaggaggaaaaagcactctaatgttttcaattctattctaacttatttatttaaaaaaaaaaactagtagtaaaccagctgcagtggctctcacctgtaatcccagcactttgggaggccaaagtggcaggactgcttcaggccaggagttcaagaccagcctgggcaatatagtgagacctcacctctccaaaaaatttaaaaattagccaggcgtggtggtgcacacctgcaatcctagctactcaggagtctgaggtaggagaatcccttaagcccaggagttccaggctgcgatgagctacgatcatgccactgcactccagccagggtggtagagtaaactcctgactcaagaaagaaaaaaaaaaaaaaaaactagtagtgacctcctaacctgatttcatgacccattacccattaatgagtcacaacctgcagtttactggtgctttatatcccccatatatccttattgaagttgagccttcttatttctaatataatcatgacttccactccattacatgacttttgatctttcatcttttttcaaaaaatgataaagaaaataaatttttaatctgatgaatgcaagacctctttaaattatcaggcccaaagaggcattaaaatgagataggagtcactgtctcacatccccttgagctaagcaattatttcaaagttgcctgctatgtggactctagactgtcaccaagtagccacaaattaacctaacaatgccatacactggatactataactcatacgctacagttcagcaatatatagccaatcactaatcaatgttatttctgtaagccagtaagaattcctgaaaaacaacttttgtaatcaacccatctcctgattggttccttttttctttaaaatattgaacctctcctttgttcttcagagtacctcccagtgtttcccaggctgcagtcctcaacctgggcctaaacaaactctctacttatattaattttgcctcagtttccttatttaggtaaacaaaagtgtattttttaattatgagctacttcacacatttcatagaataaggatgatttggtataaataatgaataagtaaaaacatttgtcctgtaccccatttttaaattttttttatttttatatatttagagggtacaagtgcagatttcttacatgcacataggcattgtggtgagtttaggctttcagtgtacccatcaccaaattcaaccctcacccctcctcctacatttgtagtcccaatgtctattattctactctgtatgtccatgtgtatgaattgtttagctcccacttacaagggaaaacatgcactgtaccccattcttttgaggcatgtgcttcccacagtgctaacctatcttgaagaaagctaatggaagaaggtaaagggatgctcccacgaccttccttttcttcctaacctcccacgaccttccttttcttcctaggtaacaagttttattgtagtcttctagaaataattgcttcatcttttgccatctaacaaacaggagtagtggtgaaaatgttagattaaataaaagtgaaatacagatttctggaaggtagaggagatttttatttaggtgcctctccaatcacaatgtgtaggtaatttccagtttcaccaacaggtaagatgagcatttagttaaagataaagtgacataagctctgaatgttttcccagaggcttttagatttttttttattttttagtcattttataaataataaatacagattgagtatttctcctacatgcatttaaaatgctagaacttctacgactaacaaaaggcaaccaggcaatgcagtatacaagaaagaactgctaaaagattcaaatagcttggtcgggtgcagtggctcacgcttgtaatcccagcactttgggaggctcaggcgggcagatcatgaggtcaggagttcaagaccagcctagccaatatggtgaaatcccgtctctactaaaaatacaaaaaaaaaaaaaaaaaaaattggccaggtgcggtggctcacgcctataatcccagcactttgggaggcagaagcaggcggatcatgaggtcaggagatcgagaccatcatggctaacatggtgaaaccccatctctactaaaaatacaaaaaattagccatgcatggtggtggtcgcctataatcccagctacttgggaggctgaggcaggagaatggcttgaacccaggaggcgcagcttgcagtgagccaagatcgtgccactacactccagcctgggcaacacagcgagactccatttcaaaaaaaaaaaaaaaaatagccgagtgtgacggcgcacgcctgtagtcccagctactcaggaggctgaggcagaagaatcacttgaacccaggaggtggaggttgcagtgagccatggctgcgccactgcactccagcctgggtgacagagtgaggctccatctcaaaaaaaaaaaaaaactattcaaatatcttaatttcatggaagacacaaagccaagcctagaggaaagaaccttctgtttccttcttaaattctctttaagacaaacttaacagacatatggataactgttctcctctaactagaatcctatgattccagttagcttatagcttacttataggcttccacatgtgatatagtttgactctgtgtccctacctaaatctcatgttgaattgtaatccccaatattgggggagagacctggtaggaagtgattggatcatgggggcagatttcccacttgttgttctcatgatactgagtgagttctcatgagatctgtttgtttaaaagtatgtggcacttccctcttcactctccctcctgctggccttgtgaagatatgcttgctcccccttccccttccaccatgattctaagtttcctgaggcttccccagcctcgcttcctgtaaagtctgcagaaccatgagcaattaaacctcttttatttataaattacgtagtctcaagtagttctttataacaatgtgagaaccaacttagacaacatggaagcctatagatggctgtgagagaagtcagaaaaaatgtaagaacagctatttaggagttaaaattatgctactgaaagaatgaccacaaatatgcatgatcctatacacatggtacattatgagaacgcataagccacagctacattttggcattcttaacttgcaaaagtataattcaataaagtaagttcagagtttttaacttacatttttttatattctgggctcaaactcctaatttccggtgaaatttccttctctattgttttagaaaacttgatgtatttcttgtggttaatagttcctgatgacaagtcagttgcaaaagaattagagccatcatctaataagtcaatattttcctctgcctggggaatataagagccacaatcaagcatgtcctctttgcacatacatattaaatatgacattctgggtcaatcattcattttagattgatattctttctcaaatagtgctaccgaagagaattttgttgaaaaaggttttactcactaatgtattatttttccagattcagtacatactctaaataactccaattatccttagtgcattatacagctataaaagaacatcatttatgaatatgtctaacagttattgcatctagcactttttctttttttgagacagggtctctttttgttgcctagggtggagtccgtggtgcaatcatggctcactgcagccttgacctcccaggctcaagcaattctcccacctcagcctcctgagaagctgagaccacagacatgcaccatcatgcgtggctaattttttattattcgtagagacgaggtctccctacattgccaaggctggtctcgaacttctgagctcaagcagtcctcccacctcagcctcccaaagtgctagaattacaggcatgagctacctctcccagcctggatctagctcttaaggcatcaaggtacaaaagtttatcatactctttgccaagaaagatacaaaagtttatcatactctttgcaaagcagtatttttattataaacattaactcgattttagatacaaactaaagccatgatccatgaaagaaataatcgataagttaaacttcatttaaagcttctgctctgtgaaagacaccatatcaagacaatgaaaggacaagtcacagactgggagaaaatgttttcaaaagacatattttataaagaactgtcatccaaaatatacaaagaactcttaaaacataataaaaaagaactcaattttaaaatgagctaaagacttgaacagacacctcaccaaagaagatacacagaaacatggtaaataatgatatgaaaagaggctcaacattataatgggattagggaactgcaaattaaaaggaaataccatcattacatacctgttagaatgatgaaattttaacaaaaaaaaaactataaaactttgataaaggaaactgaagaagacacaaataaatgagaaaatagcccaagttcatggattcaaaaaattaatattgtttaaatgtccatactttccaatgatatctacagattcaatgcaattcctctcaaaattccgatgtcatttttcacagaaataaaaaaatcctaacattcatatggaaacagtaaacaccccatatagccaaagcaatcttaagcaaaaagaacaaagttggaggcatcacacttcctaatttcaaaacagatgataaagctatagtaatcaaaacagaatgttactggcataaccaatcaataggacacaccaatcaataggacaggataggaagcctagaaattttccaaatatttacagtcagctgattttcaacaaaggtgccaagtacacacaatggggaaagaacagtctcttcaataaatggcattgggaaaactggatatccttctgcagaaaaatgaaattgggacattatctcacaccatatacaaaaatcaatttaaaatgcattaaagatttaaacacaagacctaaaactgtaaagttacaagaagataggggaaaagctctaccacattggtctggggaatgatttgttggataagactctataagcacaggcaacaaaagcaaaaatggaaaatgggattatatgaaactaaaaagcttctgtacagcaagggaaacaatcaacaggtgagaaacaacccacagaaagggagaaaatatttgcaaaccttacatctgttaaggcgataaaggatttatacccaaattacataaggaactcaactcaagcaagaaaacaaactatccaatcaaaaaatgtgtgaaggatctgaacagacattctcaaaagaagacatacgaatggcctataggtttgtgaaaaaatgctcaatatcactaattattagggaaatgcaaaataaaattgcaatgagatatcatctcacactattctgttagatattctgttagctattctgttagaacagctattatcaaaaagacaaaggataacaagtgttggcaaggatgtggagaaaagggaacatctgcacactgttggtatgaatgttagtacagccattccagaaaacagtatggaggttcctcaaaaactaaaaacagaattaccgtgtgatccagcaatcccacttctgggtatatatccaaaggaattgaaattaatatgttgaagagatatctgcactcccatattcatttcagcattattcacaatagccaagatataaaagtaacctaagtgtccatcaacagatgaatacataaagaaaatgtggtgaatatatacaaatgaataccatacagcctttaaaaagaaggaaactgtcattcacgataacatggatagaactggaagacactatgctaagtaaaataagccaggcacagaaagacaaacactgtatgatctcacttacatgtgaaatctaaaaatgttgttctcatagaaacagggagtagaaagatggttatcagaggctggggggtggagaggtttgggggaggaagagggatggggaatgggaagacattgatcaaagggcacagagtttcagttagactggaggaacaagttttagtgatctaatgcattggtgaacatggttagtaaataatatatacttcaaaatcactaaaatttttttatgttcttaccacaaaaaaagttggtaatgattatgctaatagctagattaaatatttctataatgtatacatagatcaaaatactacattatgcccccaaaatacacacaattattatttgtcaatctaaaataataataaaaaactcaattaagaaaaaagaatggcaataacccaaaacactgacaacaacaaatgctggcaaggatgtgaagcaagaactctcatcattgctgatgggaatgcaaaatggtacaaccactttggaatacagtttggcagtttcttacaaaactaaacatacttttaccatacaatccaactattgcacttgttagtatttactctaacaagttgaaactttatttccacataaaaacctacaattggatgtttatagcagctgtactcataattgccaaaacttgaaagcaatcaagatgtccttcagtaattaataaataaactgtgctaaatgtagagaatgggatattatttagtgctaaaaagaagtgagctatcaagccttgaaaatacatttaaaaactttaaatgcacattaagtgaaaaaagcccgacctgaatggttccatattgtataattccaactatatgacattctggaaaaggcaaaactatggagacagtaaaaaatcagtgtttgccaggggatgggggaaggagaagtaaatagctagagcacagaagattttagggcaatgtgattattctgtatgatactataatgttgactatatgtcataatacatttgttcaaacccatagaatgtacaacaaaagtgaactctaatgtaaactatggactttgagtgataatgatgtgccaatgttggttcaccaattacaacaaatgtaccactctggtacaggatgttgatagcagggtaagctgtgcatgtataggggcagtaggtatatggtaactctctattttctgctcattttttttatgaacctaaaactgctctaaaaaaaagtctacatatttaagacctgaaaccataaaaattctagaagactacctaggaaaaactcttctggacactggcttaggcaaagaatttatgactatgaccccaagagcaaatgtaacaaaaacaaaaataaataaatgagacctaattaaattcagaagctcttacacagcaaaaataataatcaacacagtaaacagacaaccaacagaatgagagaaaatatttgcaaactatacatccaacaaaggactaatatccagaatttacaaggaattcaaacaaatcagcagcaaaaaaacaagtactcccattaaaaagtgggaaaataacatgaacagatatttctcaaaagaagatatacaaatggtcaacaaatacatgaaaaatgctcaacatcaccaatcaccagggaaatacaaattaaaaccacaataagatatcaccttaccccagccagaatggccattattaaaaagtcaaaaaacaataaatgttggtgcagatgggatgatgtaaattagtataatttccacagaaaacagtatggagatttctcaaagaaataaaggtagatctatcgttcaatccagcaaacccactactgggtatctacccaaagggaaaaaaaagttgttgtatcaaaaaaaaaacctacacatatatgtttatctcagcacaattcacaataccaaaggtatggaaccaacctaagtacccatcaactgatgagaggttaaagaaaatgtggtatatatactacggaatactactcacccataaaaaagaacaaaataatgtcttttgcagcaacttggatgaaactggaggccattatcctaagtgaagtaactcaggaacaaaaaaaccaaataccacatattctcatttataaatgggagctaagctatggatccaaaaaggcatatggagtggtagagattcagaagtggagaggggacagggaagtgaaggatgaaaaactacctgttgggtacaatgtatactattcaggtaacaggtacactaaaagcccagacttcaccactgtataattcagccatgtaaccaaaaaccacttgtacccctgaagctactgaaataaaaaatattaaataaataaatatctttctctacaaaaaataaaataacaaaaaacaaagcctatatttaaaaaaaaagaagctatattgcttctaaatagacaccactccccacccccccaaaaagaaatagagtttagtgacaataaacgtttagaaatagaagaatgcagttggaaatattctctcctgaaatctggctgtttgcttaagacaactggcggcatccagtcgatcaaaggtgcattagtcctgagtctttgaacccaaaggtgaccatgaagattacacagacaatttataaagattaccaaggaagtttagagagaatctctgtttccacaggatggaaattaacagaactatttcagtgacttttagaatctgcatcatttgtcttataacaaaggcatacctttaagttgtttcaaaaaggcaatttgatttgctgccttgatgagatgtgtattacaaatgatgaaaggattcctaaagagattgaaaaaaatgacccaaaatagaaagctgagggggaaaaggggtaggaaatctaaaaagacagaaaaacctgttaccaaaggccaagtgaatgaaaacaaagagtagaagcttttgacacagaagaagaaaacaatctcagaaacattgtagtaaaaggtgagccatctgtgaagtataaattatacagtctaaggaaaacaaaccggtatgatactttaatattaatttttaagaattcatcttcaaaatcagtttataagggcaaaatcaacaaagtagtaggtataaaaaggtaaattttaaatgtatatatgtgtatatatatgatataaagtacatatctcagcacttttcaagagtctctgagattatttttcagactatagtataggtacatgttttacacagtagcgtcagatctttaacaaggataaatttaaaagattaggactctcaattgacaatgctgaatttcacttgagccctaaactcccagaaaacagtgagggttaaaggaatccccccacccttttgtgttctggaaaatggcttactgcaaaccactcctccccatatgacttaggtaagactctggaatgccccccttgtttacttatgacaatgccagacacaccccctcaaaattccctttctttgcgtcataaattattagctgttttatccccactgataatcagaatataatagactgacttcatgataaaatactctccaatctacttatctaatcattctactatttcatccaatttccccatacctggttctttccagcgtctctctataaaagaaaacttctgcccaacccttgagacacctacagatcttacggtcacagcattctttccattgcaatagtcctcctcctcttccaatttcaatagtcccttttttctcttgcaataattattttgaataaagtctctgcttactaagtccagatttgtttttatttgaaaaaacttgtcttatttgacacaatactagcaaaaaaaggtggaggcatctaaaaagacagaagggcataaaactctgaagtacagataagagggctaaagaaatttgatgtcctctacattattttttggttatactctcacatcattaattacattatctacaacctctcatgtaagtttaacccttttgatctccacaaaaattatccaggtccgtaccccaccaaaatactctcatcatacaccacagaagatctctcagtattatatgggttgtagggatgggagttcaatacatgttcactaaaatgactcaaacatcatctcagttacttggccaggttccttataactattactctatgaatttgcttactgattatgaatatgaggtaatgtaaactaattttaaaaagaagaaagaagaaatctttagaaactgttttaaataaatacctggcagaataaatgtactttagtttccatctttctgtttagaggtaaattctgtccttaaggactccaggctttgatgaacaagtatgaatgagcaatagtacaaaaggatttcctgccaaaaaaagagaaagaagaaatcatacgcttgtttagaacacttaagcaattatatttacctacctgaagttatctcttcaatgtaacactgacttggggtatgatacacaacatttcaccaacacagatatgtgggcaaacactagaaaaagcagttagtagactataaatcacagatcatccaattccttaactttaccttttgtggtttgagaaatccagtttcaaatggcatacaaagctgagaaatccaattacatctgtttatttaaataaaccctgagaagcagaactgctaagacagtagtaatcactcatgttactgaatgcttactgtgtgctaaatatcatgataaagacttgaagaggtcaagtttcccaagatcacacagccagcaaatagtagagacagaatttgaattcagacaatttaactccaagcctgtggtcttcagtcccatagaacattgcctttcaaaacaatgctactgcaaacaaaagatggtgtaggccgggcgcagtggttcacgtctgtaatcccagcactatgggaggccgaggtgggcggatcatgaggtcaagagattgagaccatcctggtcaatatggtgaaaccccgtatctactaaaaatacaaatcaattagttggacgtggtggcatgcgcctataatcccagatactcaggaggctgaggcagaatcgcttgaatctgggaggcggagattgcagtgagccaagatcgcaccactgcactccagcctgggatatacagtgagactgtctcaaaaataaaaaaaaaggccaggtatggtgactcacatctgtaatcccagcactttgagaggccaaggcaggtggatcacgaggtcaggagttcaagaccagcctggccaagatgatgaaaccccgtctctactgaaaatacaaaaattagccgagtgtggtggcacgcacctataatcccagctactcaggaggctgaggcaaagaactgcttgaacccaggaggcagaggttgcagtgggccaagaccacgccactgcactccaacctgggtgcaagactctgtatcaaaaaaaacaaaacaaaagaaaacaaaacaaaataaagaaagaaaagatggtgtagcctcacttcaaactcaagactttcacattatgcaaatgtgataaccaacacttagaaattcctcaaattttcatattttcaactcacatctgagttacattttatgagctatttatcacagtgctagctatattacattatattacattgctagttataatcatcagtctttttcttgtaaagtttaactgcaagtattaatattctaatgaagacagagtacttaaaatcatttttatttatttctgacatatgtttatagtcattatttttcaatgtgatatgtccaacattcctggaattcaaaatatgttaaaataaaatagaaccacattgaaaatactcatctcagaaaatactggaaatctatgcaggtctccccagtaacccatcctacgtaatctcttctagatcttctccaaccagttcaatatttacctctaaactactgtgcatagcacttactgccttcactattcttgtcttcactatttaactgacattaatcatttgccttgtatttgtatttttcatatgtatagctcctataccaactatagcctaaatttataaagaactgggactggtaacttatcattcttaaaattatttctcacagtatcaaatacaatggtatatatataatgaaggaaagagtagaggaaaggaggaatggtatggagggaggggaaaagagagggagagagggatgaatgaacaaattcccttcctactaagctactcaccaagatttcttaaatcatcaaagtgcttaattaagcagagttgacacgttttgaataaatcttgaaaggaacaattgttctgtaatttattgacgagattatcaaaaagttggcaggtcttaatttgctggatgaatcaggtaccgcataagcctctccaaacttaaaagaaaaaattaacttagaaagtctattccctgtaactctgacaatataatttttctcaactatttcaatcctgtcttctatcggtgaacttgcaggaacaaatcaagagaaatggagggagtcgtatcccttttctccagtcatctatccattcacctttctatccatgaattcaacgtatatgtctgcatgcttagtgtgcactaggttctctcctaggctctagggatataccaatgaacaaaatatatatatgctatatatatatatatatatatatatatatatatatatattttgtttatatatatataaaatctgccctcatgaagcttatgttctagtcagggagtgaaataataaaatagaaaaataaaacatattgtatgttatctgcaataagtacaaaaaaaaaagtaaagcagggaggggaatatgaaatgtagtataggggaagagatgcagggaacagaatgggtggccaaggaagaccttactgagagggagacttttgagtacagacctgcaagaactgaagtagggagctgattaatatcttagggaagagcatttcagccagaaagaaaagtaagtacaaaagccccgaggcaagaagaatgttcaaggaatagtgggaaggccccaggaggctgaagcaggagagatcagagaggctaagtgaaagtggcatatcatggaggacccctagatgacagtaagaactgtggcttgtactctgaaggagtgacaagcattgaaagagttctgaggagaaggattacataatctgaagttctttctgaaaggatcactctggttactgtgaggagggaaatcaggtaggtctgggttcctgaatgccaagtgaagaaagtacttcaagagtgagcaatcaggctgtgcatggtggcttatgcaggtaatcccaacactttgatgcgggggtgggggtctaagcaggagggctgcttaaggccaggagttcaagaccagcctgggcaacagtgaaactcccacctctacagaattttttttttaatcagctggacatggcgaccttagtcccagctactccaaagactgagccaggaggatcttttgagcccaggagtttgaagctgcagtgggctatgattgcaccactgcactccagcctggacgacagagaccttgtctcaaaaaaaaaaaaggggggtggggtgggcggttaagatcagtactgaatggttcgctaggtttcacaacacggaggacactgacaaacttgaaaggagccatctgggtggggtggtaaggagacaatgtcgtcagagtgagtacaagagagaacggggtaaagaaattgaacccagccagtagggtaggctctttcaaggagttacgttgttaagagaaataaggcagtagctgagaggaaaatggggctgtgaggctttaagatgagaaaaacaaaggcgtcttcactgaagcatgactctgtatgacatcctttcacaaaataccttcctctttcctctcatgccacatttccctcacaagccgcccgactcgctcgcttttctctcgccagagggactgaaaacgtcattaataccaactgcatacacaactccattgcagctactgccattcatgaacgttcaaactttcgtcaccctgttttcatatttgtgtaacaaacgtcgagtgaacgaacctccacctcttccaagaacccacgctgaggaggcttcccatagaccctgctcttacgaagccaacgacttctacaggaagaaagaggacctgtaagctagcgagtgaacgacccgcaagatggaaatgagtgtgctaatagaggtctccgcctcccgctgaaggagcagggaagtgacaccacccccgggaccgccagccttctacaacaaccaccatttctgaggaaccacctgatcagtctcagtcacccttcaatctgcccctttgtcccactcagtcccctcactgttcctttctggaaccttccttcacccagccccaccactgttctccttcctccctcgcaccctactgcattctccaccctccacctcgaaggctcccctcccaactcctcagcgggtctcgcctcccctccccacctctgtcccccaagggtcccactaccggcccgagctgccctcccttcctctcggctggaggcccccgcgctctctgtggtcagcccctgccgcccctcgggcggcgctgctctagctctgcagccttcccaggatcccgcgccgcgcggccccgcccccgcggtcacctgaccgagcccgacgctccgcccaccgaccaccccgagcggagcgggcccaggaccctatcggctgtcgagccggtgctgccgcggccaccgccaccgcccaggggctccggggctgtggggagcggctgaactcaataccgcctccgcgctgactggaaggcactgcggccgcgcctgcctgccccacctcgtaagggcctgtgacctcacgaggccagccgccgggcgctgcattcgagcggtggggctcctgtccgtgcgctttcctcccgcagccccggccgggattccgccctccgtccttgccacccgctcgccactcttccctaatcgctgttcattctccggtgcgctgtcccgccatggtctgaccccacttcaatcttaccttcggtccgtcctttgaacaccccgacccccgacccctttcttccaaaacattccatccttcttggcttctgctactcaataatggacagcagctcgaaggccatgtgtcccacggctttgctgaaatttgtctcgggttgcctttaaggagactgtcgtttccttttgaaagagatactttggttggtttggttttcttctgtgtgtttgtttttcctatgtatttatcgtatgcagttgggcaaaatacttaacgctccctgagtctcgattttctcattcttccagggttgtgggaattcaaaaatatatacgtagtgctcaataaatgttacaatatttaatcccttccgtgatactactgtgttcatttacatcttaaaccttgctttgtaggcattctttaatattttatttagatttttattattattaaatatatgtacaaatcataattgtaaatatttaatggggtacaatgttatattttaatatatgtatacaatatggaacgactaagtcaagcttaacatatccatcaccttgtttaacgttttttatggtgagacatttgaaatttactcttagcagttttgagatatacgatatattattattagctatagtcaccacactatgcaatagatctcagaaacttgctgcttttgtctgactgaaccttgtaccctttgaacagcatctccccatcctgcatctcctacccgccccgtccctttccagcctctaacaactattctactgtctacttctatgagtttgactttttaagattccacatataagtgagatcatgtggtatgtgtctttctgtgcctggcttttttcacttagtatgtcctccaagttgattcatgttgtcacaaatgacagaaattcttttttaaggctgaatagtatccattgcatatgttgattcatgttgtcacaaatgacagaaattcttttttaaggctgaatagtatccattgcatatgtttactacattttctttatccattcatccatcgatggacacaggttgattccattatctcagcgattgtgcataatgctgaaatgaacatggaagtgcaaataagtctttgatatactgatttcagttactcaatatatgcccagaaatagcatcgctggatcatatggtagttctatttttaattttttgggaaacctccatatagttttccataatggctgtaataacactaacagtgtaaaaggtttctccacatcctcagcaacacatttttttcatcattttgataatagcaattctttttttttttttttttttttttttttgagattgagtcactctgttgcccaggctggagtgcagtggcacaatctcaaatcactgcaacctccattcctgggttcaagcaatcttcctgcctcagcctcccaagtagctgggattacaagcatgtgccaccacacttggctaatttctgtatttttagtagagatggcgtttcaccatgttggccagggtggtctcaaacgcctgaccctcaagtaatctgcccacctcagcctcccaaagtactgagattacaggtgtgagccaccacacccagcttaatagccatgctaacaggtgtgaggtgatattgtaatcttattttgcatttccctaataatagtgattttttttttcgcaaacctgttggccatttgtatgtcttcttttaagaatggctgtgtcaggctgggcatggtggctcacacccataatctcagcactttgggaggccaaggtgggaggaccgcttgagcccaagaatctgagaccagcctgggcaacatagtgaagcctcatctctacaaaaaaaaattttttttaaaagtctattcagattatttgtctatttttaaaatcaggttatttgctttcttgctactgagtttcttgtatatcttggatattaacctcttgtcagatgtataattagtaaatattttctcccattcagcaggttgtctcttcactctgttaactgtttcctttgatgtgcagaagtttttagtttcatgtaattccatgtgtttattttttgttttctcgcctgtgttcttgaggtcatgtccaaaaaaatgcccagaccaatgtagtggagctttccgcctgttttcttctagtggctttcttctattttttcttctagtagctttccctctatgttttcttctagtagttccagtcttacaggtaagtctttaatccattttgacttttgtatacggtgtgagataagggtccaatttcatttttctacacatggatatatggtttcccaacagtttttatcaaagagattcctttccccattgagtgttcttggctccttatcaaaattcaattgtctgtaaattctggactctctagtatgttctattggccaatgcatctgtttttatggaataccatgctgttttgattactgtaactttgtcgtttattttaaagtcagggactgtgatgccttcaactttgttttttttttgcttttttttttttgagatggattctggctctgtctctcaggctggagtgcagtggcacaatctcggctcactgcaacctccacctcctgggttcaagtgattttcctgccttagcctcccaagtagctgggactagaggcgcgcaccaccacgcctggctaatttttttgtattattagtagagacggggttttttttttaccatgttggccaggctggtcttgaactcctgatctcatgatctgcccgcctcggcctcccaaagtactgggattacaggcgtgagccaccacacctggcccaactttgttctttttgctcaagattgctttggttatttgggatcttttacggttccatatgaattttaggatttttttatttccatgaaaaataactctggaattttgataggaattgcattgaatctatagatcactttgagtagcatgggcattttaattatattaattattccactccaagaacatgggatgtcttttcgtttatttgtgttttttccaatttctttcatcagtgttttttagtttttagtataaagatctttcactttcttggttaaatttacaccttttttgtttcagttttggtttttgctaatataagtagaattattttcttaatttcttttttggatttgttgttggcctctagaaatgctgctgatttttgtgtgttgactgtgtacagcaattttactgactttattagttctaacagttttttggtggagtcttttgggttttctatatataagatcatattgtcaacaaagagaaaattccaatgcttcctttcctattaagatgccttttatttctcttgcttaattattctgactagaacttccagtgctatgttgaaaaaaaaaaaagcagtaagagtgggcatccttttcttgttcctgatcttaaaggaaatgccttcaacttttcactgttgagaatgttagctgtaggcttatcatatatgacctttattgtgttgaggtacgttccttctatacctaatttgttgagaattttcatcatgaaaggatgtttaatttcatcaaatgctttttatgtatctattgaaatgatcatatgatttttgtttatgtggtgtatcacatttatagattcccatatgttgaaccatacttgcatcccagggataaatcccactagatcatggtgaattattctttgaatgtattgttgaagtcagtatgctagtattttgttgaggatttttgtatctatactcattagggatatgacctgtaattctttagtgctttttaaatgtatatagtttatctccccaaagattctgaaatatctgagtgctgagaccatgtcttttatttttgtaaatacccctcaatccaccctccatcacccgctttcccactccccacgcctgttgtgtttaaggatggtacctcggagtactgttcaatcaggcaaagactctctaaagattttaagagtggctgggtgcagtggttcacgcctgtaatcccaacactttgagaggccgaggtgggtggatcacctgaggtcaggagttggagaccagcctggccaacatggtgaaacctcatctctacaaaaatacaaaaaaattagccgagcgtggtggcgggtgcctgtaatcccagctactcaggaggctgaggctggagaattgcttgaacccgggaggcggagattgcagtgacccaagatctcgccactgcactccagcctcggtgacagagtaagactccgtctcagaaaaaagattttaagagtatggctcacaggtcctctcattcaaacaatagggcttctaagaaacttaaggtctttgtccttcagcagaagcccaaggtagaaaaagacatatctcaaaggtatttgctgccatggcttttgtctcctggactaaaacccagtaagattcacagtagattcaaaaattgttttaagagaattgtattgtcagaaatactgtcagcttgagctgaaaaagagtacaaaaaggaaaggggcctttggaccctttctacaaacgcatttctacaaacaggaagcaggctaagaaaactatttaggtccaaacacatctccctttcacacaaaaaaggatgacttagaggataaaaccaagagcccagaaggtggaaccaaaagccatagggagttattcccaggctttgagtgtagaactgcaaacctgtactcaaatggatttcagaattgctatgaaccagtgacttctgtgcaccttggtttccacctgttggaacaggagtgtctatagcagttatctccctgcccctgctgttttacattggttgctgtggggaaaggagcatatgacctttttctttttgttcgcagaacttcagattgaaaagcatgtacttgagtagctgtatttaaggaattacacccaagaagtctcatcttccctggacttacgtagaggataagattctgaactttgaattgatgctataatgggataagactttggggccttagaaggggtaagtttattttgcatgtgggagaactataaataatttgtgaccagagggttgcctgaggtagtcttaaaatatgtccacaaacactttgatatttgtattcatttcctatgctgtggtaacaaattaccacaaacttagtggcttaaatagcacaaatttatcatcccaagtttctggaggccagaagtacaaaatgagccttacagtgttaaaatcaaaggctgcatttcttattgaggccgtggaagagaatccattctttgccttttccaacttctacgggctgtatacattgcttgacttatggccatatcagtctgacccacttccattcactctcactctggcccccctaactccctctcttttttttttttttttttttttttgagacagagtattactctgtcatccaggctggagtgctgtggcacaatctcggctcactgtaacctttgcctcctgggttcaagcgattcttatgccttggcctcacaagtagttgggattacaggtgcgtgccaccatgcccaactaatttttttgtatttttagtagagacagggtttcgccatgttggccaggctggtctcaaactcatggcctcaagtgatccaaccacctcagcctcccaaagtcctgggattacaggcatgagccactaagcccagccctgaccccctcttataaggacacttgtgattacattgagcctccccagataatccaggatgattgcctcatctaaagatcattaattatgtcaacaaagttgtttgttccacgtaaggtaacatattcacaggttctggagatggggatgtggctgtctttggggggcaatgattctgtacacaatgctcctcccttcaagaggtggcatctatttccctcctcttgaatgttagctggatttagtgggctacttctaatgaatagtgtatggcagaaattatggtgtaacacttacaaaactaagtcataaaaaaattgtagcttcctccctgttctctcttggattactcccgctgggagaaactagctgacatgtcatgcagacactcaagcagtcctatagagatatccaagtggtgaggaactaaggtctattgccaatagccagcatggaattgatgcctcctgccaacagccatgtgagtaagccatcttagaaaaggattctccagccctttttagccttcaaccgactacagccctggccaacagtttgactccaacctcatgagagtctctgagccagaaccacccagctaagccattcctaaattcctgaccacagaaacagcaagataatgtttgttgttttaagctactaaattgtggagtaatttcttatgcagcaacagataactaatacaatccccactgggtgtggtggcatgcacctgtagtcccagctacgtggggaggttgaggtgggaggattgcttgaacccaggagttcgagtccaacctgggcaacaaagcaagaccttacctccttaaaaaaattttaaaaataaataaaataatacaatccccaaggtcacatattgagctatgagggctacttaacttctaggtattaactctgcattcccgcctgcaagatgaaggaaatggagaaaagtatgttccttcccttaaacagcatttactggaagttgcatacacctctttcatttacatctcattgtctatgagatggacatggcacatgtagctacaagatttttgcatgctctttgtatctagcaactttactaaatttgcttattagtaataaaagaatatttattctgggcaaccatgtgcccaactaaacagcagaagttctaatattatgtgagaaggagaaaacatactgggcacaatcagcaatctctgtcacaatggtgagtgtaagggtcaggaaaggcaaagtccagcacacacccatcaacatttttttccaatttcttaacgaagtatttccattggccaccaaagcgatatttacacatcatcactgtgatctctccaaagaatcaagccaattctgtatgagtcactggaaaatccaattactatactaaaatgaaatcaattgtgaaacgttttccttacaagttcttattggggacactgctaaagaataatttaaaatggacattttgtttaaaggctcctaaattttctaaatggtgctttctgtgagcaatctttgatgtgtcagaaaatatacagctgatgaaagtgtttcctttatgcaaggagttggaggggcttcattataacattagcagcctcaaggaaggcagtcatgttcctgacctcttcattttcttttcacatacaaaccattcttaggtagccacattaagtggatttttaaatttttatgtaatgatatacttaaccctaatcacaagcttctaagactgcctccttgcatgttttaaccaaactaaaacaaattaggaatatatacttccataaatatattgtattataaaaccaattagaaatgatttttaaatggcttatttgcagagcatacgttatggttccattatactgtgaaaactgagtaattcccaggcaatctgcttgtaattggtcccagtggccattagatggctctgttactgtagagtttggactaccgaagccaagcgttaaaggattacaaatgtggcttgacatatagcttttcatctcattttacataagatcctctattttcatccagacatttagtcagcagttaccaagacgtaaataaaacatagtgaatctcacaagatttcaccataaaaggtctcagtctatgttcacgtaatctcttaatgatgtcatgtattgtattatgctcaaaaaatgtacattatgttaggaatttaagactcaggccaggcaccgtagctcacacttgtaattccagtactttaggaggtaaaggtggaaggattgcttgagcccaggagtttgagaccagccggggcaatatagtgagacctcatctctacaaaaaaatatgtatttaattagccgagtatggtggcatgtgtctgtagtcccaacgctttggaaggccaaggcaggagaatcccttgagcttgggaggtcaaggctgcagtggccatgatgatgccactgcattctggcaacaaaatgagatcccgtctgaaaaaaaaaaaaaggacttaaagacaaagattatgttatcagtgttctgtaaggtacttcagtcccacactgttggtgttcaataaattttaaacagccttttggctgtaaagtaaaaaattctaagtattattctagcatcctataggatgataatgttaataattaagattttgatcctatctcctgtgaataaattctgtaagaatatttccttgcttgtgtcttagtacacataaaaagtatcctgttagtttttccccaggattctattcttccagtttttcatgggaatttgtggtcatgagtgaaagcaagatacccaagatcatttaacctggaaaataggtcaaagtagattttcattttgtgtgggtggatatttcatcttctgagtatgtcaggcaaggtttgctattaactgtatatagtaactaagctgccttactataaagttctttctaggcaagaaggctaaatatgtgattccttaaatcagttgttcttaaacttgagcatgaattagaatcaccagggaggcttcttaaaacagatcatgggtccccactcccagattttctgattcagcagctgtggggtggggcctgtcaattttcatttctaacaagtttccagctgatattgatgttgctggtcttgggaccacactttgacacccactgccttaaataaaatttaggcatttaaatggtcctgtaaataatttgccattaagctattattttatccatttatgcttcctacaaacaaaatctaggctacactggcagtctgttcttttgaggttgcacaagttcctaaataatacccaattaaaaaaaaaaaaccgcaaactcttagaacagtaataacctactcatttaaaaaatattaagtctaaagagggccgggcctggtggctcacacctgtaattccagcattttgggaagccgaggccggcggatcagttgaggtcaggagtttgtgaccagcctggccaacatggtgaaaccctgtctctactaaaaatacaaaaattagccggatgtgatgatgcacacctgtaatcccagctactcaggaggctgaggcaggagaattgcttgagccccggaggcagatgttgtagtgagcagggatcacaccactgcactccagcctgggcaacagagagagactccatctcaaaaataaataaaaatacaaaaatttgccaggtatggtggtgggcgcctgtaatcccagccactcgggaggctgaggcaggagaatctcctgagcccaggaagcagaggttgcaatgagccgagatcgcgctcacttcactccagcctgggcaacagagcgagactccatctcaacaacaacaacaaaaaaatctaaagagaagctctggattctgaagctagcttcagtacccatagtagtcatcattctgttacatttggaaacatgcttgttctaaaataatcatttctgagtcaatgacacctattcttttcatccaaaggaaacagaaataacaacacaggaagcactgagcagccttaggccaattctttttggaaagtacatttaatttactgttgcacaaacccaaacagagaaggtggttaggaagtgaggaaggcacttaagaaatttcaaccacagccgggggcagtggctcacgcctgtaatcccagcactttgggaggccgaggcgggaggatcacgaggtcaggagatcgagaccttcctggctaacaccgtgaaaccccgtctctactaaaaatacaaaaagaaattagccgggcgtggtggcaggtgcctgtaatcccagctactcgggaggctgaggcaggagaatggcgtgaacccgggaggcgaagcttgcagtgagcagagatcgtgccactgcactccagcctgggtgatagagcaagactctgtctcaaaaaaaaaaaaaaaaagaaaagaaatttcaaccaggaatacttaacaaagaaaaagaggcctttggaccccattaaaatcatggatgactggccgggcacagtgcttcacacttgtaatcccagcactgtgggaggccgaggaaggtggatcgcctaaggtcaggagttcgagaccagcctggccaacatggtgaaaccccgtctctactaaaaatacaaaaattagccgggtgtggtggcgggtgcctgtaatcccggctactggggaggctgaggcaggagaatggcttgaacctgagaggcagagattgcagtgaactgagatcttgccattgcattccagcttgggcaacaagagtgaggctttgtctcaaattaaaaaaaaaatcatggatgacctgggaatctcagagaagtaaagaactgactcctaatatggcaacttgtcaggaatattcaaagttttccgttattgtccacagatcctgagactggacataaattttctccaaaagagctagacacaatccctttgtgccgtgttatctgatgccagaacactgtttagctgttcaccccacaggccaaaactgctatttgctacctcatgaatgcagctacaggttatccccacatattgacaaataatattggtcttcaagacctgtgaacttcattccagtagctcagacaagattcctgatttgattcacctgttaaatacattttcttccccctttgatacagtttcttcatataaaacatcttatctaaagaaaatgtcccattaacactctcatggactctgtcttagtaactgaagattataatcacaggcgtgagccaccacacctgtcttagtagctgaaggttataattacaggcatgagcttccacacctgttccctgccactatttctaaggacttcttggatccatgactatccctccccgccccctatttatccctctaccatactgccattccctacagtaaggagtaatccatgggtgagacagggctcagtcattgccccatatctaattccaaggcttattctcaatgttaacacaataatacagaatagatatttcagctacttatggattcctcttccctaatatgtggatgcaaatgtgtgcaaagtgaagaaagaaataataactaaatgaagcttaagtgctacatcaggagagacgtaactattaacaaatgttggaaaacgggtttggagagaggatagaatgagactttcattgagaaaggtgatatggaatgacatctgctcttgccaaagccaggtctctcagatctcccaactaaaaacacaaacagtatcaatatcccagagaatcttaaccgcacatttgatgacacagtaagtcccagcatcttagaatgttgatactgaaagagaccttcaagactggctgctaaaatcccatcatttctcaaactagaaaacagctttaagaagaagaaagtgacttgccttaattaaagattatttagctgtaacactgaggccagagctccagttttctgctcatggaacaaatgttgataagtctttctttttttcttgggcatttgggggtggcttttaatgttggatgtatgtcaacaccaatggagccactgcttttctgggacaaaagaacagtccctcttcctcaggaaaggtccaatgtgtccacacatctatccccatagccttctatcatgagagagcccctcacagatccagccactggccagtgacttgctgtgaatgatgccaagtgggagtgtctgtaccctgcccaagtctgtgtggtttcctatgctctccttctttgccatcacataaatttacaaatataatgcaagcatgtttatatacatgttcttttaagttaagaaaacctcatcatgagaaaaataaaataaaattgcactgtggcctctcagattaaagactgagttaaaatgaggttgtccaacccatagaagaacaggccacacgtgctgatacaactgacccatcattccatcctggcacttattcccagccaactcatgggaataattccttcacaaggcagccaagaggtagaaggtaaatacaatcagccccatggatggatacagcacaccaaggcacagggccaggtatgtggaggtgctatggatgagggacaggaggccggaagcatagggccagacctctggctctacaatagcactctctccctttgaggaaaagcatttggtcatgagagacatccccagctcatagcaaatgtctacagcagtgagggtgtggaattaggaggtaaagagatggtgctggcctaagggtgacacacttcttctaaacaaacctccagagtagagctgccaataaggcaaatctgaagggttgtgattatgaactgggagatgctggtacatcccccaggccatgaatgacccctgagtggcccagacatcctcactcccaacaggtcaaagaattagcttgcaaggacttcccttgcgagagaaccatagctgggttgaggggatggcaaaaggcacaggcagctctaatagttcagctctccctgactcctccttcggcctgagggaggggaaaggaggcagaggtacagatgacccgggctgccaagcccagcagttcctaccatagctgctgagagtcaggcctgagaaccataaatttatgaactcagggtagagccaaggcttggtgtcccttcctctggaatgagaggcctcagccctgcccttctcttcagggacaatggcctgatgaggaaagctggcttctcactgaggtaatgaagaacacctgctcagctccatagtcaccctcaagctaagcaggaagaatccctgcaggaggcattctgggacaaaggctaaggagctcagcttatcaggacacatcacaattttaaattacacactcccacacacaacacacacacataaacacacagacccccacatacacacacacagacccacacttccacatactgacattctcccaacctaccccactctgagccccaaatccctccccacaaatactgtcctctgtaaacatgatggcagggactcctgcaatcgtggcacaggctgataatgatctgaggatgactgcttatcattaagtgccccggtacgtgatattggtgaaggtagacgtggcctctttatacagtgggttgttggcctgtggaggaaacagaatagcatcttacagtgacttccttaagtccttccctaccctgaatgtttaaaattcatctcagaagttttcccaaggcaccgttctctggaatacatcatcaatgaaacagaataatgttcattttgctcacactttagttcttggcatgggaattgataggaaataacaggaggagatgaggtagaatgccatcctgccaccgtttctttttttttttttttttttcagacagggtctcattttgttgcccaggctggagtgcagtggcacaatctcggcttactgaaacctccacctcccctgactcaagacatcctcccacctcagcctcccaagtagctgggactacaggcacacaccaccatgtctggctaatttttgcatttttttgtagagatggggtttcttcatgttgcccaggctggtctcaaactcctgagctcaagcgatccacctgcctcagcctcccaaagtgctggaattacaggcatgagccaccacacctgttccctgccactatttctaaggagctatattcagcctatcactcttcagtgattccacagcattcggggatagaacctctcctatttcacccctgtgtccccgtctcttttgcccttctcctattttccattccctgtgacagtgataggagatgtggacaagggacagaaatgtatcaggtgcaattcagaacacagaggaaagcttttgctcaaataattattaatttgttttcatctaatctggccaagcactaaccatggccaggcatggtggtttatgcctataatcccagcacttttaggggccaaggtaggaagatcacttgagcccaggagttctagaccagcctgggtaacagagtgagaccctgtctctacaagggaaaaaaatacaaaaattagctggctcggtgatgtgtgcctgtagtcctggctacttgggagggtgaggtgggaggatcacttgagcccaggagatggaggctgcattgagccatgatggcaccactgcactccagcatgggtgacagagcgagaccctgtctcaaaaaaagaaggaaggagggaagggaagggaaagaaaaggagaggaggggaggaagggaaggggaggggaggaagcgtaaaaggaaggggaggggaggagaggggaggggaggggagggaatgggagaggaggggagagaaagagaaagcactatccacaaactgtcatgttatcaggaaaaagtaagaccctcactaggtttcccaaactattttccaacagaaagtaacaaatcctataatggtagcttcaagaaacacattcttagccaggcgcagtggctcacgcctggaatcctagcactttgggaggccgaggcgggtgatcacgaggtcaggagttcgagaccagcctggccaacatggtgaaaccccgtcgctactaaaaatacaaaaaatagctgggcacagtggctggcgcctgtaatccagttacttgggaggctgaggcaggagaatcacttgaacctgagaggccaaggttgcagtgagccaagatcgctacactcaagcctgggtgacagagcaagactctgtctccaaaaaaaaagagaaagaaacacattcctgtgggcctcataggtacaggatgttccacactgttctaacagaaacatctcagtttcttgggacccttgagtataaagctctggggtcaacatcaaatgggaacaaacttgcagcctaactctggacatttggggagtcaaatagccatttggagggtcgaggaaaaaagttgaaatgtgaaagaagagccaaaagagaatagagtaagattaagtatatagaaagttctcagtaaatgcttatttaattggaataaatcaggataaaagagtagagtctgatttggaagtaaccttttattttattttattattattattattattattattatttttgagaccgagtcctgctctgtcacccagagcagggtgcaatctcagctcactacaacctctacctactgggttcaagcaatcctcctgcttcagcctcccgaatagctgggattacaggcatgcaccaccacacccggctaatttttatattattaatagagacggggtttcaccatgttgcccaggctggtctcgaactcttgagctcaagtgatctgcccaccttggcctctcaaagtgctgggattacaggcacgcgccaccaggcccagcctggaagtaaccatttatttgaggagaaagaagagaatgagatggaatgacatcctgccactatttctaagaggctgaaggaagctgaaggacaaggggatagtgagaccatctctcccagtttccagaacagaggataatggaaagacgatggtactggctgaacatgaccacccaaagcatctgctgcttccacttaagagtctcagaccaatgactttagaaaacgcccagccccgtctcttactgtgtcccattttgctctggcgcgttcttcctcaaatttagcgaattcttttcggtcgtggatggtgatgaggagtttccagatgagcagggcggcaaggccaatgagcagaatggcccccatcactgagagcaggaccaccaggatgtcagggcccttgggacactctgtgaggaagaagcacagagcagggcggttgtgaatgaagcaggagtcacttgaactggctatgaaaaaggtgttcttgacaaagtaactaaggtccttgaaggaaataggacagttttcaaaaattaatttttttaaggagacaatcattaggacagcaataatctgcactgagtggctcaaatcagaagtctagacctggtaacccctagacagaacccagccacacctttgtgtgggggttcacccaagtgtttattttaaaaattaaacacaaagaagagaacaccagacactgggacctacttgagggtggagacggggaggaggtggggatcgaaaaactacctatgagtcactatgcttattacctgggtgatgaaataataggtacaccagacccccatgactcacagtttatctacggaacaaacccacacatgtacccctaaagcaaaaataaaagttttttaaaaaattaaaaataaaaagccgagtgtggtggctcacacctgtaatcccagcactttgggaggccaaggtgggcagagcacctgaggtcaggagtttgagaccagcctggccaacatggtgaaaccccatctctactaaaactacaaaaattagcctagcatggtggcgagcacctgtaatcccagctacttgggaggctgaagcacagaatcacttgaacctgggaggtagaggttgcagtgaaccgagatcacaccattacactccagcctgggtaacagagcaaaactccatctcaaaataaataaataaataaataaatgaataagaaataaaaaattgactttattggcaatattgaataatcaggagattctccccctaaaatttcatattagtctctttaaaaagaaaatccaggccaggcccagtggctcatgcctataatgccagcacttgggaggccgaggcaggaggacagcttgagtccagaagttcaagaccagcctgggcaacatagtgaggctctgcctctacaaaattgtcttttttaattagccaggcattgtggcatatgcctgtagtcccagctactcaggatgctgaggtgggaggatcgtttgagcctgggaggtcaaggtcatagtgagccatgatcgtgccactgctctccagcctggatgacagagggagagactatctcaaaagaaagaaagagagaaatacagaaagagagagattcttatattcctgcagagcagcagttagctagagctgaggaggagctgctccttttagttggaactcatgttttctagtttaccagaatccccaccactctcccttctctctcctagaggaaggcagtgtgacttgttggtgtgtctgcgctcctgtggatgttacagccagactccctgggtttgaatcctgacttatcacttaacttttatacatgatctttggaaaattacttaacctttctgaatgtctgtttcctgtttctccatctttaaaatgaagatagtaatagcactgactttaaaagaaacttgttatgaggaatgattaaattaaatatatcttaaaaactcagaacaatgcctggcacagagtaagtgctcagtaaatatcagctaccgttgtaacggatcttcttacacccagctgttttcactaacttatttgcttccttagccactgtaagtatttgtgtctgttatcctggttcagatatttacattcctgagggctgtgaacctaatgacattttttgcattcttagagaccaggacctgccagccaagacaatattttgggttctttcccaaaatacttagtcatctaaaatcataaccctattgaaagctgccttcctgttcaaccccagtcaacaactaaaacagaggcatgtcacccctctgggggtcaggctgagtatactctgcagagctctgcttcccacaaatgtcaggtatctaataggtgatcttattccagtaacctcaagtgttatgaaaccaggtgtttatatatgagggtgctaatgagcctggagaggaagtcacacccactttccacactgtctcccaccttcttcgccaaacatatacccaatgctcaccacacacaccacaaaaacaaccaccaccataactcaagctggctatctcccaacccgccaaattacaacctgtctataattaaatgagtgcctggagagaggctgtgaggttccagtgttcaagttcccaagagtgaagggccccagttctgggaaaaacaattatggattctctggaagatttgggtagggctgaccctcaattatcaaagtaaaatctctttaattctgcacattagtatgggcagggcaggtagggtgccaggaggtctttaggggaaaacaatctgttaaccatgtgtcctgaaaggagtttggggtgggtttcctggaagcagaaggcaagatcaggtgacctctggagggcccttccagccacagcggtggaccaatggcaaatgacccaaggtcagagaagtctgggtagggttggcagattcagcaaacaaaaacacaggatgcttggccaggtgcagtggctcacacctggaatcccagcacttcaggaggccaaggcagccagatcacttgaagtcaggagttcaagaccagcctggccaacatggtgaaaccctgtctctactaaaaatacaaaagttagtcaggtgtggtggtgggcgcctgtaatcccagctactcaggaggctgaggcaggagaattgcttgaacctgggaggcagagattgcagtgagccaagatcacgccgctgtactccaccctgggcaacagagcaagactctgtctcaaaacaaaaacaaaaacaaaaacaaaaacaaaacaaaaaaagcaggaagccaagacaaatctgaatttcagataaatgattattttttactatcattgtgtaccaaatactgcatgggacctagtgtattttatttggtaaccccatctgggagtgataagagcccagctcaagagcccattccatgtggttaaattccatttggccaatgccaaaacttttggcagtgttgtctttactgccctatagtggcttagcccttcaaagagagcatctgcaagagcatgagttggggaagagaaagagaatcatctcccccactgtctgaggccccagctgcaacattctactcaaagccaggaaatgattggagctgggagatgagcagggaggcggagcctagaattccagagcaacaacataggaaatgttggccctgtgtgttggctcacacctgtaatcccaacactttgcggggggctgaggcggggggatcacttgagtcccagagttttgagactagccagggcaacatagtgagacttcatctctacaaaaaaataaaaattaaaaagtagccaggtgtggtagtgtacgcctgtagtcccagggaggctgggatgggaggattgtgtgagccgaagaggttgagactgcagtgagccaaggtcgcaccactgcaccccaacctgggcaacaaaatgagaccctatctcaaaaaaaaagataggaaacgtgggtctatggatctggggtctgttctcctaatgtgggggaaggggtctactggcagtgaatactcaaaaatgttttctaataattcatcttaacctgttgtttaaggagaacaaaggccatgaaggtgttaaagggaagcaagcgatcgacagcattggttggtgacaaacctgtggctggtctgtgtatgatgggatggattcctcctgctcccagaaggcactgtactttcagtgttcagggcagccttgccttagtgcctcaaacctatccctacatcctgcagtaaacttggaaaggtaacacctctaaccatcaggccttcctctgaagcacagtcaagttgctcttggcaaccatctcaattttaatagtgcagatgccatgtgctgtaaagtcctaaaatttaaattctttatttcttgacatcattgcctcaaaaaaatgcgtgatatattttgtccattaatgagatccatatctatcttcttctccttacctgctttctgattttcctgtctcctcaattaacaagtcactttcttgataatatttgtatttataaatgcccttcacccagatgacggtccctaacttatcgtttttttttgttgttgttgttgtttgtttgtttttttgagacagagtctcactctgttgcccaagctggagtgcagtggcgcgatctcagctcactgcaacctgtgcctcccgggttcaagtgagtctcctgcctcagcctcccaaggagctggaattacaggcatgcaccaccatgcccggctaatgtttttgtatttttagtagagacagggtttcaccatgttggccaggctggtattgaactcctgaccccagacgatccacccaccatggccttccaaactgctgggattacaggtgttaaccaccacacctggcccctaacttatcacttgcaggcttaacctgttttgcttaacagcttcgatgagtagagattcctgcctaacatggttctccctctccctcctggggcagggccgggagccgtcagggttcactcacctggctcttctaccacatacaggatggactttccactagaatcttcatagtactggaatctgacgacacagtcatcctcattcttataggtacaattcactgcatccttgccagtgtcctctgggagtagggaaaatggaggaataaaaagtgagacaactactggaagatgggaccactccaaacccctatcacaggacttccagggaagtatgtgacaggaaaccctgtgcctcatgtgcacgatgcctagattcaaggtggctgttgtgtctggcagttgccactcactgacactcactgatgtattttgtactgcataggccctttttggttcctaatccttcctctgaaagggacatgatataacagtattacacaatttaattcaaatcctggcttcactacctacccgttgtgtgatcttgggtaagttacctgacctcatcaagtctttcttcatctataaaaagaaaatgatacccccacctcacaaggtcggtgaactaaacagcataaagtgaacagtgcctaacatatagtaggtgtactcttccctctctttcctttctctgcttgcttagtgattcttaatagtttgcttatgcagctgttctatttcttccatttctgtttctgatccagtatacctccccagagctatcctctcttctctgactcccaccgtgttttgtagacttcatctcttctaattctaaagtttgttattctgcaaagatactaggggttaccctccactagctgcactgtgccccatactgatgaaaccagatgagtaaaactgacacatgatgaaattaagcaaatgtacccaggtcacacagcaaatgagtgatgaagcagaacaagaacaggagtctcaaagcacatcttgcagacttgaactcaacaacccttcagaaaaccagtggtattataatacagggaaaagagtacggatttcaggacctagttcttatcttaatttgccattcccttgcttgggccagttacttaactttcctgagactcaaaatgaagatgagaatagtactgtagttctacttcactaggctattgacagaaaaataagataatgtatatgaaagatactttataacttttacaagctataaaattccctataaataagcatttattttaatatgcttatttccacactcttttccctgtactataataccacaggtagaggggaggtggaggtacagaactgcttatcaattagcctgtaatacccacctagtgtagatggtaaaaataatatctcagcagcctctcctctctgaactaatcatagcaagcctaatctcctccagaggaaaaactgtttcttcaaactcaatccccaaatcgctaacctcaccccagccctacttctgatattagccaaaaggcccagagagctgactcttttctataacacgcccaccaggaagctgactggctggctgtgtcttactgtggctctctctgaaatgtgtttctgccttcatgggagattgctatctatggagagattgccatctctctagtactagagtaccatctcaatgcctcgctggcccacataactatatcagatgtgatgacagcagcaaagatcatctccttttaagttaagatgaaggacagagaatacttcaagaataattgcaggcaagattttttttctccctattgtttgtatttctgtctgtcttatttcaaaaggggccccagagaggcagaaggacttcagataaagcttttggttgcctatccataaggttgaaggtttccctccaaactgcaaagctttaagcaaaatcttgggcactgcataacacttttagttaagtaaacttggtaaacgcttactagcctactgagctaagatgatgactatcacaggcaaccacttcccagctctgtgcctcagttttttcatctgtaaaatgggatacattctcttcccttccttagggaggcacttgctccctttgctttgcaggctcttgctgagtctgtgggctctgggaagcagaagtggtggatggctgcacacactagtaagagaggaggacaactctcagagacaccagctcacatcaagtgtccattgttcctcaagcctgcacaacattccctgaggtagaagtcacgcttccattttacaggtgggagttggataggttctgggattgaattagaaacatttagaacctgggtgtgtgcaactctaagatgtgctgaacttactaagctctttcactgactcaatctcgtcacggcagtaacggttgcaggtattttcgtcatgtagggctccccggtcaaacttcttacactccacacattctctgaaggagagaggacacagtgattaaggcaaagaaggagcaagcctaagcgtatcccagtccagctctgatctccatgcattcagaaagctgctccacctccattaaaacacacacacacacacacacacgcgcgcgcgcgcctgtaagacaatcctggggacctgaatggcaagtgtggagttcaggggtgggagtgtccccctcacctgtaggcagcacctggcagccagaagcctcccaggtccttcattaaacttcccgtcccatccagggctgtgccaggatggtgaaccctatgccatttctgagaactataaagtcagaaccagtcatgtcatttgggggcccagtgcaaaatgaaaatgtcagctcccttgttcaaagattactaagaatgtcaagacagtgatggcagagcattaaaacaagcatgaggcccttgtaggcacagggccctatacagctgcataggttgcacactcgtaaatctggccctgcttaaagtggtaagcagaatggcagtgccatggactcaggctgatggggcttcctctggcccctaaagtgggaggtttgtagtagtttcacagagtgtcctccataattccagccctcacatctcccactgaatcagaacattagcactggattgttcctcagactggtttagccttcctcccagctcagagggagtcaggatgtcaccctaggagaggacattctcaatcgaagtccagctcgttcaactttggctccttcacagttggctctattccaacttgcccaaagcctttggcaaaaggagagacagccatctggctggagtggactcctctccctaaggctctggtgagcaagaaacacacctggagagctggggattctagtcaggggatcctctcctacctcccagcctcccggctctctccagactccacactcacttcttaaaggtgcaggcatctgggcaggtggggcacttctcacaggtgtccccataggagcccggctggatacagacacagctgccacattcacacttgccgcggccgctgcacagcagcccattgctggacatgcaggtgtcagtacgcgtggtacagttgcagtagtagccggtccagtcggagtcacacaggcagtccccacagctgcactggccatggcctgaaaacacacagcccaggaaggtggacccgctggcgagagctccactcccatggcagcaggctacacacgaccatcctgctctcccaaccacacagataatgatcctccaggttggcagggaattggctcaccacccaggggagtcctacccagcagggacaaactcagttttctaggggtcccaaggtatggcaggacttgctcggagccactgtagagcaaaagattctcaggaactaagtctcctgggcctcttgccctctctcttgcccttttctgaatacctctgccttctgagaaaggcaagagaaagggtaggaggcttagaagacttagttccttctagtctaagaactagaagcaagctctttagcccttctagtttggctgacacagcacaaagccacagccctgaacctacacagggcactcagtagccttgacggtgtgacttgatgatggcaaaaggcctcacaggccccaaaactctctccctttgacctgacacagcgctgctcgcctctcctacctgacctgagaggcctactaccattgtcgtcatcgtggccacccagttgggttagacaacaacatagggtccagtttggaagagctggtcccgtcccactaacaaagcagccaccacttccatttctcaaatcagctaggtgttaccttgcaggatgagaagcagggctctgagggcacatgcacaagacaggaaaattgtagcatagggaaagaaggaaaggagagatccagggcatggggttattccaaatgcagagagggaaagtgcacacagagcaccctgaatgtatgggtagatggggtggggcatccaaggggcagagggacggcactgagaacccatggagttggccaacggagccaagtaagcagagagaacaaatatcccctacctcccagactgccgagggccagtgcagttaaacaaatcccatgaatgccatagagaaaagaagtcagaaaataagagaaattaaatgaaaaaaagagagattttcctaaggtgaacagcagtagagacaatcactagtaatgacctcacgtagcccgatggcctcccccatgcccctgttgactcatcctggttcctgcctctgcactcaacaggtggagaaatgtttgccacaattcaacatttttttaattaattaattatttaaagttacaggcgcagttcaagttcaccaacacaacctgtctttcttgacctggttcccttctcaatctgacctcatcatatcatatctgggagtgcagtggaacagacttggaaagcatttagagaagagaatgtgtatctactttccaaaccaaccaaggaggcatttaatatgtgtcaagtactgtgccaagttctttttctttttatttatttgcttttttttttttttttgagacagagtctcaccctatcacccaggctacagtgcagtggtgcaatcattgctcactgtaacttcaaactcctgggctcaagtgatcttcccaccttagcctcctgagtagctgggactacaggcatgtgccactgcagctggctaattatttttgtttttgtacagatgggagtcttgttatattgcctaggcttgtgggcttgtgccaagttctttcttttttttttgagagtctcactgtcacccaggctggagtgcagtggtgccatcttgactcactgtaaacccccacctcccgtgttcaagcgattctcctgcctcagcctcccaagtagccaggactacaggcatgcaccaccatgcccggctaatgtttgtatttttagtagagatggggtctcaccatgttggccagcctgaccttgaactcctgacctcaggtgatccatgtgccttgccctccgaaagagctgtgactacaggcccggccagctggtccaccatgcccagccgcaagttctttagtatgttatccttttcatttgttataacaaccctttgaggtcagagaggttaagtaactttcccaaggccatatgccttgtaaatggcagggtcaggactcaaactgaagtcactgtgacttcagatcccaagtgcttagcctctatgcagtgtcataagcaatgcttttccctatttatactaatatggtctttccagaagatgtctctaacttacagagaaaatggccttaaccaacagaagatggagccagttttaatggaatattcttcaaattgaccagtggaggaagaaaagagaccaaagtagtaagaaagaagttatggaaagtccagtaactaggcttgatctcaatgagaaatttcaaggaaggaacattttaggagtcaaatgttctgaactatttaagcgaagggtggatgggcctcactgtagatatttccatgccctgtcctcagcctggtcctgtctctagataagtaagtcatctccccttctccaggtgattgtcaattcctctgtggccaggattctctttgtaaaatgtgatttctcaaccttggtacttttcaatatttggggccagataattttttgttggggaggactgtcctgtacattaggatgtttagcagcatccttgagctccaccctctagacatcagtagcacctttccagttataacaatcaaaaatatcaccagacattgccaaatgtgccctgggagacaaaatagctccttcctcccagttgagaaccaccgttttaaagtatgagtcaacttgatcatgtaactcacctgcttaaaaaccttcaaaggccaagcatggtggctcatgcctgtaacctcaacactctgggaggccgaggcagattgatcacttgagcccaggagttcaagactagcctgggcaacatagcgagatcccgtctctacaaatttttaaaaaattatccgggcatgatggcaagagcctgtagtcctagctacttcggagactaaggcagaaggatcacttgagcccaggagttcaaggctgcagtgagccatgatcatgccactgcactatgggctgggcatggaaagaaatgtctgcttcccaggaaggatggcggacataacccaagctgccccagctgccaagtatatctggaaagtagagatgttgggctgccagaagggtggggaaagcagaaaggctgtgtcccgaggctaggttccctagaagtacagcttggatgaggatcttatttaagggactcgctgaggatgtagagaggagggagggaaacaggacatggcaagaggcagagctggcaggaatgtggtctcagccagatgccctccagcctgatcctacgtgaatggcaccacaaagccaggcccaccctgaggcgaagagtctagccttgagtaaccccttctccatcagtcattggccaacatctaggggcaagacagctcctgtcagccgagggcagttcttcacagaaggggcagctgtgagctgctatcggccaacctcacagcagctgggggaggagtgcgccagccagcagagctgcccccccacccgccccccggcctttcactacaccctgcatttggccacggctcctggatgggaaagaccgacaccacaggggcctggcagcactcagaggcctccgcctcctcagaaactcttgtcccatagtgtttcctttgtgaggctaaacaaagtgatctttgacaagatgggccagccagggagtgaggttgggagtggaagtgacaggtcagagccagcaggctgaccccaagccttggtagggttagcccttaaaaggtagccacagtgtggtaatgtcacaggactggcacccttccagcaaaagggaggctgagtccgggttcatcggaaagtcagaggagtaaagtaagaaatgaagagtggaagaggagaaagggaggggagccagaaaagggagggaggaacgggtgcttaaggtcattgggaacacgagccccacagctagaccttctgggctgatgctcgctccactcctgtctgtcctgagcctgcccctcctctgagatctgtcagacatcccacctcctccatgaagccacccaggcctaccctgtccccagtcaagtctcgctccagtggactcctataacattccctgagcactccacacttcctggatctgtcagattcaacctcatgttgggaattatccttggttaactgtcttattcacgcctctctatcctactccacaacagcacagaatctggctcacagaagctgcctgactgatctgtggctgtggcaagtggaaaactcccttgaggatgatgcacttcttgatgtttgaggcaggaatgttgatcatgagcaaccatgaagaccaggcccaaagtagggaggggacaacggggatggccagggaaccagccgccatgcttacaggccatgggctagggaaatggccgagtcacagaacacctgcctcctgagcccctgcttatagcaaagaatgaagcatagagccagcagctctggcaaggggcaatggtgagtggggctttaagcttggagaggtcagggatcatgcatgaccccttgttcactcatatggaccaaatgatggcacagagcaagtgctcaatgatgtgcgcccctgagtatctgtcactggaggatgtgatgatggcaccacagggtctagacctgaggctgggtgggcacctgacaccctagcaagacatggtagagggaggcggcaatggctgccctggttccctcatggattagactggaatgcactgaggaggagctgttcttgcactggtgagaggcaggaactggggcttctgacccagtcagctttgttttgtggctttagtggggcagcagccaaaagaaacatgctctggctgggatcctgccgcagtgcctcacaccagaccaggaaccatcaggccatggaggaggactgggggtgcccccgtggtccagccgtactcctctcctgggaccaccctctctccctcagtccccaaccttcttcccaggggtctcccacttcaaatttacccatttcctttggtactttgaattagatataaatactttaaatagtaaaatgaagtgaaactcctgcctcaccccctaattcaaatggttgctgtttgtgctttcatctgtgtgtatctgatctcttgctctcccctaatcattctgataacacttccttccaaactctctctaaaattttgacagcatgagtaaaggaaacaatgtcgtagataataaaaaaagcagtcatttttatgttactgacatgctttagaaagacacagatcgacctttctaagtgagcttttttaaaggttaatatcagtatcgaagtgagtatctgcatggattagctcaactgattagagccccaatgctggctgggcgcagtggctcatgcctgtaatcccagcactttgggaggccgaggtgggaggatcacgaggtcaagagatcgagaccatcctggccaatgtggtgaaactccatctctactaaaaataccaaaattagctgggcatcgtggcgcatgcctatagtcccaactactcgggaggctgaggcaggagaattgcttgaactgggaggcagaggttgcagtgagccaatatcgcaccactgcactccagcctggcgatagagcaagactccgtctcaaaaaaaaaaaagaaccccaatgccaatgaagccaatctgagtcaagggtcatccccagaaaacaattataatctctctgtttggccacacaatacacccgtaacccagtcccaaccaacttgtgtctgtcgcaagagggattaagccacagtgattatggcccagtaaaaacccatcctcagtgccccaggaacaactcaagactatttgccctctgagagtgttgccaacatgtctgcggataaagactacattaacattagttcaacttctagctgggaaagtaccccaggagtggttcttggggcaaggagaaactagtttgagattatcagtgggcctcaagattttactgaattttgcaatgagaaggacaactcagtaccctgctgagtagaaggacttaaaattataatccccaatctgtcagcagggactctctgtggcagtgctatccaagagaactttctatcacgttgaaatgttctagatctgtccaatatagcagccactagctacatgtggccactgatgagctgaagaactgaatttttaatttttcaattttggttaatttaaatagccacatgtggctaaagcctaccatattggatagcaaagatctagaatccaaaaaataacagtagcaccaatagtagtaacagtgattaacaaaatagtgctaacattaacaagagcattacaccattttccagacattgttcaagcacactccaatgtcttgcatatatactactcttttcccggtctcttgtgatacaaagataaactcatgtaaaattattactaaccttactacatattctgacatgtgttttctaagtctataaatgctaaaaatttaattgccatctatcagtaacttttttttttaacgtgaaaaggggattggtccttatactcaaaaagattaggaaccactgacttacacctctgcctgcaaagacccatctcaggccttcacctatgtttccagtggttgcaggtatatgagggggtgtgggttccaggacagggggccctgcagttctcctcacctgagcacatctcccccttgtagcggacacaggagaagtcgtcacactcgcagtacttgcccgtgatcttgccaaagtcactgctgtggcagacacattgaccacagaggcactcgccccgctggctgcagacgggctgaccctcccgggggctgcattcgtcctgctgggaagggcgatagtcctcctctgagcactcacactgggatcccagccagccaggcccacaacggcataccccacactcaaaggtcccattgccattgttgcagcgatggctattaggttcagcttgggcctggcaggcacagtcacaatcaaaggtgacctggacgatcaggctgtccttgaagcccacgggctttatggtaaaggacttctccttctcctggggacagcctcgcaccttggcctcaatgctgaagctcacctggatggaaagaaagattgtatttagacacagttgggcccagttaacactccagctctggaggaaaaaaaaagttgttccctgccctgccaaggaatacccaaattgggtgtcttatgcttttgcaatctggagttcctcagccttccctatatgaaggtctgcaaagcaaaaacacaagcacgggaatagtatcgttgtgacatatctagctggatgcagagacatggtttacagtcaataaataataaaaggctgttttttcactccacatatgaaatagaccagctcaaactgaacagaacctgtgatcatataaacaccctgctttggcctgattataattatcagcaagatgcacaaagcactattttgcaccacacaatcccacatggtggtcaatcataagctcaggatctacttcagttcccacacatttcatagcttatgcaataaagcatgtttcaggacaatatttctaacatgggatgtttgcacaagtgcctgagagacagataggtcaatagaaaggatcagcgtatccaaagatctattttcttcccctccttcctcccctcccaccaacccctctccccttaggcagaagcggaggagaaacgaccaataaggaaagtcgtggagagactggagtgttttacattttagattttactttcttgtgtcgttttacaaaagaaaggtattaattaccttggaaaggctggcgactggtgagggactgaaggtaaagaaatattttcctttgcaatcaactgtgcatacacaaacaaaggtaaccaaattgtaagtttttcaaattcctgagagtgaagttcacgtaacagaaatggcttacgcaacagaagcctcagaggaaaagattggtggatccattacatctaacttagaatgactttcaggaaacgtatttttcttgcccatattttttttctggtggaagggggccatttttagtcactacaaaaggaagaaagggggttgggtgcccacagatgctccaggacaaaggccctgcccagcccacctcaccgtgtctccaatcttgagtcccatacaagacttgaggccagggatgacctcattgttgaggcaggtggcattgaaggatagagacaactcttcagggaggtcacgcacttccagctctactttagaacggattttctgagcagaaaggggcacaagaagacaagaaattgaactgaaaggaaacgggaaatggcaagagccagttccatcccaagccaaatctggcaagtagctctggactcaccccagcagtgccagaggccaaggtttgacctggaagctgccggagcacccctaggactctgtttcctgcgcaggaacctgctccctctttccatctccacttgcgtctaggtgagtctgggtaaaatgtaccagctacaccctcctgcaggcctcacagatgttgcaaaaggggagtgccaatactggtcaccttggaaagtggcattttctacctaatgtttcatcaacctcaccttccccatgtctcagctctctcttttccctgttattggagcccagttttccctcactctgcccccacaattccagggctctgctccttctccatctaatcaccatccccatccccatcttctttccttctttctctcttccttccttccttccttccttctcagaaggctgcatcccttctagagcgggccattgcctgggctctgggagcacacggagaaggcagtaagaccgtgtggtagactggcaactgggactcacaaatctgagccctgctgtgtaagccaaatgaggtggactctccgcgggactattcccagcacaagacacttaccccataagcatcaacaatgagctggaggacattgctggaatccatggacagaaccccaactgtggtccctgggatgagctcactatagttctagaaaggaaaacaaagatgtccagagcttaccaaaggaagctggtggtctccaaaagccctccccaaatcccactgagagtcctgagatgaagattggaggaaggtacgggatatttcaattgtcactgccaggaatatatctagcagtttttcagccctgagcaaaagtagaggaaacctctcacacccctcaccacctcccctccaccaccacaaacaccaacacatacctagtaagttcaagattgcaggaaaaaggcccagagtgcaatctttagctcctggggagtggattaggggagactctttcctgattggggactgtatccaatgctagcacaggctggctacctggggcacccaccatcacagggcccactccaggaagcccgaaggcacagtcacctgatagagattgactacattttcagtcactgcaaagatcaaattgatgtttttctgggatagcttctcagtcatcagccccaaagagggataatcctaggaaaatgaaggatgtagaggttaatgacgtctcatgtacatctctagggtctaaagcttagaacttatcttgcttgggctgtggctcagagtgtggtggtgcttaaaccatttcacttcatgctgaaagtgagacaagagcctgggcaacatagcaagaccccatctctacaaaaaaattttttttatttgccagatgtggtggtaagtgcctatagtcctagctactggggaggctgaggcaggatcacttcagcccaggagttggaggttacagtgagctatgattgcaccactgcactccagcctgggcagcagagcaagactctgtctctaaaaaaaaaaggggggtgacagtgagataagaagggtaagtagcacagaagtctacttgtgaactccagggatagacgaagaggtacaggccagtggtgtcaaaactaagcacctctttcttcctgcttgaatttaatgcactaatactatggagctgcttccgtgcacaagggactgggttaggcctctgttttggaactactgacaaatgccttggcctggccctcgtgatcctccaccgtgtggtctcagtctttctttccaaatattgctcacctctctccctcttccactcagcagtgatctggcccactgtctcccacctggagtggccttcttgttggtaatcctcctcctttcttagggcctagcttagcccccaccttcttcaggagacttccttggccatcccagctcatgatgacctttcctcccttggatacgtatagccacattggctgtgccacacccatttggcactaatcatgcatcttgtgttattgtaaatatatatatcctttctcctcaagtagaccaaaaactccccaaggatagaaccatacatagtcttgttacctccctcagcccctggcccagtgccttgcatagattaggggtcaaatgttgctgactcattgtctggtagtgcttgacttggatatggctgacaccaaggaactcaaggacactgtgcgggggcggtggtgaatcgtgaacatgtccatgggatcctagaccttgcagggagctcattagatcctcagctcagtctcctgcctttacacaggtacacctttaagtcacctagatgaggaagttgctatattgtccttaggagacgaagagttcacacctgccccagatacctagagcattacagcacatttctcttatggcttatagtaatttctcctgattcaatttaaatattttcctcttgtttaaccttctatggccatataaaacaacttataagaagttttctcatgtataagctaaatcatcctttagccttctttctttcaagctaaatgactctggccctttaatctttcctcgtaggacctgttcaccatgccttttatgttctttcccctctttctctctctctctctctctctctctctctctctctttctaagagaaggggtctccactaggagcaatggctcacacctgtaatcccagcactttgggaggcttaagagggcagattgcttaagccaaggagtttgagaccagcctgggcaacatagaaagaccctgttttcaaaaattagctgggcatggtagtgcatgcctgtggtcccagctattcaggagactgaggtggtgaagcttgtgagccaagattgcactactgcactccagctgggcaacaaagcaagactctgtatcaaaaaaaaaaaaaaaaaaaaaaaaaaaaaaaagcaggggtggttcttgctctgtcactcaggctggagtgtagtggcaagatcacagctcactgcagcctcagactactgggctcaagagatctttctgcctcagccccacaagtagctgggaccataggcacaaaccacaacactcaacgaatttttgcattttcttgtagaggcagggtctcactatatttcccaagctggtttcaaactcctggactcacgtgatcctcccacctcagcctcccaaagtgctgagattacaggcatgagccatcatatgcctggccaatctttctcttttttttcctctgtcttcttccaataaccacaagttagtatggtattccaagaaagggctaatcagagtggagaggaagacctgctttccagctgggttgtaaaaatcctttgggtccattctggatcccatgatgctgctgctatgctggtgacagtgaaggcagtgataacaccacaatcagggacatctctaatggttatataggttgtatgctggatgacggtgtccagttggtaagggataggggcaagctggaaccgagccctgcaccctgcccagaaggaggggctgccattttcatattcacacagactctgcctagattagggcaaccctcacaatcatgaatagaaaccataggtggtgccagagatctcaccatggtagtggaggcagagtaatgattgtcactaccaacatgacactgcccgtcattaggctggacaatgcctgccagccttccgtccaatgctatatgagtcttggcatcagtggtaaacaccagcaagtgggatgcatcattcctccagccaatcttttcctgttaaaagaaaacaaaaaacaaaggcagaggagacaaaacaaattcagccatgtcactggtagagaacagagacccaaggtgctccctggctaaagggctggacagcttatttttcttcaaaacaagggtctcagtcccagtccttggaaccgaagctgaagctttccagttcaggagtttcattctcttcagaaaacagtctcatagctgattagttcaagcagctgaatgagatcttcttaaactccaaacttaactcttctaatgacagtcacattgctcatctagaaactgacgtgcatccacagagctgatctgggctagaagaaatctcatctgaacatctgcctactttgctgaggttaagttaactcagccttaactctgaagtaactctgaagatgggaagatgctctcccctgggaacatctgagaccactgaggttcaaagaaatgtcagctcaggccagggagtggatctaagccaaggctgaatatcaggagcaacttactactcataactgcaggaagccctgcttagttctcatctcattttacaccagaaatccccagagttcagtcacttcctttcccattttgatctatgccagccacacctggcactccaagtcctccaaactcacatcacagactgtagcctgcatgatggcatcaaagccaccctctggggcatctcggttccgtgacacactctgcttcttcacttcctcattgaagcgggtcacctggtcagttagcgtcagcacgtgtttgtagccaaacatgggcaagcaggtggtcttcatactggggagggatgggagataatttaagcagacaccttcatggaaaaggcagcatgggaattgggaggaaagagaggggacaaatatagatagtggtatgccaaggccagttccatacaaccacagttacccagacagttcagactccaaaatcctcaaattatctgaagctccccatcaacattacccccatccagctaacctagaagataagagattgagctggaaacaagactccctgagcttagatcccaggtgccctctgtactagtcatgggacctttggcaagcctctcaatccaacctatgaaagaggggccaggatagcacatatcccataagagttgtgagacttaagtaagttcatacacacaaagcacttagaccagagcgaggctcgagttgctattactatcaccttatacttaacactttcctaaagtaacaataaagcaaaagtccatcagtaagttaaggtccctgaaccatcaataaattgatagatcatgcaagacaggagcatttctgcccccagtcaaaatagtgtgtttaattaatagctgatgtcttgcctgggaaccttacaacccagatagaaggttgaatgccacatcatataacttcaaaactttttcttttttttttagagacagttgtgctccattgtccaggttggagtgcagtggcacaatcatggctcactgcagcctcaacctcccaggctcaatcaatcctcccacctcagcctccctgtagtcctggggactgcaggcatgcgccatcacacatagctaatttttttgtaatttttgtagagatgggggtctcactatgttgcctaggctgaactcaaactcctaggctcaagtgatcctcccatcttggcctcccaaagtgctgggattacagaagtgagtcaccccacctggccgtaactttgaaaactaaaaagtaaattcacaccttttcaggctcagcaaccagcattgtaagttattctaatacatggatttgcacagtctccaccgattaaataaataagccattcagttttaagccaaagtgtcaaacagaggcacaagttatccatttacagactataaaagtgtccaacaaatgtcatttccactcttttatattccttagcacttcatttcttctgttttcaccctgcaggatgcacggccttgatgaagacaataatgccaacaatggaatcgatccttctgtaatcgtaatttctcggtttccttatccataaatttctttctacttttgacgtcatttccctcccattctctcttgccttctatttatttgttaccaagactgagaagctgatgaattttctttctaggttctccaaacagccttaggctccattgacacaacactccagatccacaagctagcccatttgccaaacagggagaccaaggtagaaaggagctatagtttggcaagaagacagccaacaaagtgatcctagagctagaaataggaaccaggacttggaccttcctggggcaaaggatgctgtcctggcgtctggaggagggacttactcatagcaggggttttcgagggcctctggtggggagatatacatgtatggtgacacaggcttgtccacaaatgccccgaagccaatccgcaggttactggtgagctttcgcatctgggtggccagcttggtacccaggttctggatgctccacagatcatccttcatggagtaagacaggtccatcaagtagtagatgtccacagggtaatcctccacctgccgcacttggatggagaaattcttcgaatcatctggaaggcagaaagatgttagtttttatcttcttctcccaccaagattgaataagcagatttggatacagttgggactaagaaattgcatgatcaaagcaaaccagaaagccctggtcccttttcctcttcctttgcaattctattactcttctaatctcttgaccctcctatttttaacctcttcttttccattctaaaattttccactttctctaaatcccaggggatttctaatcctgtgagttccacgggtctatcactgtgagtcacagagattttgatagttactacacttcagactctgtaaaagacagaaactgcaccctacccttctctgaatcccattgcatccaacacatgccttgatagtaggtaaatccttcttgacttagttggaaagtcaaaatcaatgcttcaaaatttctgtctttagtctaacccttcctccctctaaaggtcttgtgtacctattgtgtctgcccccattcccctgtcccaattccccatgaaaggggggcttacaagtcgctttcttgttctatatctcatttgcacctcaacacaaagctctaagctaggtaaaacaggcacttgggtaaagaagaaacaaatattttttgagcacctactatgtctgaagggttaagtaacttgtccaaggtcaaatagctaatatatgatacagtaaagattcacctcagatcttctgactcaagtcctaacgtctcttattttcttccattctcttgcccacacctcccccctcatccttgtcttcccaccccatttccattctgagctacttccccaagacttcctcctcagacctccaccttgtgctctatgcccacctgcttcaggtctctccccgcaaagagtcccagccctacctggccggagccggagtgcaatcctctggggactgacttgagtgacctgggagctgtctccagagcccttgtcgctgaggggcctgtcctctagtactcgggcctcactcactgggaactcgatggattctggggcacagttatccttcagcagattctccttcaggtcacagcgaggtgagcccagaggcagggcctgtaagacaggagcccaaagagaagtccagcaatcagagctatggcgactctctacctcctgcaggccctaccacttcccaatagctaagagtttaccccgtacattggagcataaacaaattgttgtggtctttcctgggataatcccttaggaccgttgtacagaaaggggaaattgatactttgggaggccaaggcatgaggactgcttgaggccaagagttcaagaccagcctaggcaacatagctagaccccgtctctaccaaaaaaaaaaaaaggaaaaagaaaagagaaattgagatatcaagaaggcctattcatggagttgtagctagaaggagagcctgtacagtaagatgcctggtagaccagcattttttaactgtggaataccacacatttgtgggtcccaaaatcaatttagcaggtgtcaaccatcattttgttaaataaaatacaatagaatagaatagaaaatatgaaagtgtacaaatagtcaaagggttgttttgtgaaattcttatattgttggaggagagtggagaataacacatataataaataactatacccagtacagtgtgtttctttctgtaggtcagagtcaaaacagtttggaagctactgtatttgacacgggctagactgtgagatccatgtagtcagggactgtgtgtgtcttggcccctctcatttcccagcatccgacctaggacttaccacaaatgtgatagggaaaggcagtgtaaggaggcaggagagagtcagggctaagagcacaggagtaaatctcagcattgcacttacaactgcttactaaggcaagtcacctaattcctccaagcctagtttcctcagctgtaacacgaacataataacagtccctccttcagtacttaacagcaatcaaaatcatagagtcaaaaagtagaatagtagtttccagggactgggaggaatagagaattactgttttgatgggtacagagttttagttttacaagatgaaaagagttaaggagatagatggtggtgaggggtttcatgacattatgaatgtacttcatgccactgaactgtatgcttaaaaatggttaagatgggccaggcacagttgcttatgcctgtaatcctagcactttgggaggctgaggtgggcagatcacctgaggtcaggagttcgataccagcctggccaacctagtgaaaccccgtctctactgaaaatacaaaaattagccaggtgtggtggcgtgcacctgtagtcccagctacttgggagacggaggcaggagaatcgcttaaacctgggaggtggaggttgcagcaagccaagatcgtgccactccactccagcctgggtgacagagcaagacttgatctcacaaaacaaaacaaaatggttaagatggtaaattctatgttatgtatattttcccacaataaaagttacttaaaataatagtaattatggtacctccctcacagggatgtcacacaggctaaataagacaatccacataaaatgcattggacagcacctggcacagaggaagtcctcagcaaatgtaagctattactatgagatgcttgacaagtacttcctggataagctaattatgaataaactccacaaacttgggaacatgggccaggcacctaaccagagcccatcctatcacttcagtgtcctccttcaccctgaacaaagaacaaattgagtacccttccaaaaacccacggccccctggggctctgggtgcttaaacctgagtattgaaggggaccacgccaccctggaaagaacactgaaaatcaggaaagaagatcaatcctaggcctgccactgactagtcatgtgacctcagatacgtcattttgtgtcctcacctgttcaacaaggcctttagatgacacagtgttttcagtcccttccggctctgacattcagccaatttagccaacactgtgtgggtgcatgtctatgagggctccttaccaagttgaggggaccagccaggaagctggaaaacccctcccgggacctatttcacaatgtctaggccttcgggctctcctcaaccccacccctacccacatccccaaccagcacttccaaatgtctgctggataacccacaccaatatcccagaacaactagtgttgacatttattgaacacttactgtatgtcaggcactgtggtgagcactttacatggattattgcaatatgcctgacagttccataatgctggaactattataattttacaagggagaaacctaaggtttggaggcttcacaaataaggaacccaatcttacaggtaaggaatctgaggcttggataaattaaggaatttgctcaaagttgcagagctaggaagtggcagaactgagaggccagctagattgtctgactgtaattatcatcataaaataagctttactacattccgtatagagtgagagtcaaggcacggaaaaggaaaagtgtggaaggaatggtcctagggaggagccacaacagagaatgccccaggtagggaacaggatgcaaggtgggcatgtgcgagggatggagaaggatggatgacatctgcctcctcagccccctcaagcaacctggcagccataatgccagaagagggactgggccacaaggagccattcatactcaaaagccctgtaaccggccgggtgcgatgactcatgcctgtaatcccagcactgtgggaggccgacacgggtggataacttgagctcaggagttccggaccaccctgggccacagggcaaaaccccgtctccactaaaaatacaaaaattatctgggcatggtagtgcacacctggaatctcagctactcaggaggctgaagtgggaggatcacttgagccagggaggcggaggttgcagtgagccaagatcacaccactgcaccccagtctgggtgacagagtgagaccccacctcaaaacaaaaacaaaaacaaaaaaaccctgtaacccaaaacccttcccaatgcttaaagtctctctccctctccagtccgatccccctttcatgggctgaagccttccccacgtggatggggacacgagcaacatcaacagcatgaggactaccctggcccaggcaagaagtaagtagagtttctggaagccagcagcttctctctttctctctcatcttcacaggtatgcaggcagggaaccagcctcggcgatggaaatcaatgaataagacttaaccttcctggtggcaaatactccaacagggacatcacagaccttccacaactctgaggaagatgaaagtctcccgtgcacccagctctggctgaggacggaatgacctggggagaacttgggcacttcaggttttgtgcccagactcctcctgttgtccctgcccacctctcctaccccttcctcctctggaagcagtctttctcttgctcaaaaaagccccaatcctatctctgattctagctgcccacaaagccccagggagaaaaccttcccaaaaaggcagtggataaatcagaatgcagtgaggagcggatcctttccaggaccaagacagatgctgaagaagacagcagggaccggagcccagcaaactggatgagagcagcaaggccttcatgcatcttcaggctccatcagcagagggagagaatgcattagacgggagtttcctgactcctattttctaatgtggcagtcctaatgagaagagggtttgaagcgctaagatgtgctgacagtcctaatggtttgttatgagtttccttagaaaaattaaacactgaaaaacaaaactgcctccctccctccctttgtggttgctgacatcagaggtcaggaatataacaggcctgctcgtcagccaagctctccacgagagccctctgttccagaagagcaccaaggcagtgacctcaacatacttgggcaacattccctttcttggtaacccaggctgagaaggtagaaagaatgtctccaggttatgcaggaagaaagctagaagggggaggggtggatattaaagtttcagttcccagggaaaccggatgttacacaaaaagggcaaaaatagccaagacccaggggaagggcctgagcacagaggtgggaggttccagccagcgccctgcgagctggctgaattacctccctctcctgggagggtgacacacgctcttggtaccattctccattaatcccattttggaaattgggaaagtacaacatgaatagttgtcattatcctgcctatttcacagggttggtcaggaagtaaaagaagactgtgaatgtgaaatgctttcaaaatataaaaatctcaacataagttaactatactgaaatccattaggacagaggttcccaaccttttaggcaccagggactggtttcagggaagacaatttttccatggacagggaggtggggatggtttcagaatgaaactgttccaccccagatcatcaggcattagtttgatcctcataaggagtgaacaacctggatccctcccatgcccagttcacagtagggtttgagctcctgtgagaatctaatgccaccacggatctgacagaaggtggagctcaggcggtaatgctcactcacctgctgctgacctcctgctgtgcggcccagttcctaacaggccatggactaggaattggagcccctgctttaggacacagtataagcaaataaatgcaaatataagtgactctttttttttttttagatggagtttcgctcttgttgcccaggctagagtagtgcaatggcacgatcttggctcactgcaacctccacctcccggattcaagcaattctcctgcctcagcctccctagtagctggggttacaggcctgcgccaccacgcccagctaattttgtatttttagtagagacggggttttgccatgttggtcaggctggtttcaaactcctgacctcaagtgatctgcccactttggccctgctgggattacaggagtgagccaccacacctggcaggtgactcttttttacagttaccacaataactactattatttcatactcttcttggagagcgagagtcaatatgccccagtactttttttaccccagagcaccaccaaaacatctcccatccattgctgtcttgattaactcatctggtgaggacaagaaatcacttgaacatgcaaagagaaaagaatgaagagggcagaaaggaggaggggaggaacatgaagcatttttgtttatagttgttggtattcacatttcattgtttacaagaagaggagcactcttaatattatacttccttttacaataataaattggagcaaaactctcaagatgaacatttgtcctccagattaaaaataaatagaaagaagacaagtcagaataaaattatgtttgtgattataaagaaatgtaaatcatggcctatatcttgctcctgcagttgcagagaagaaaatgagaaggaaatcctattagagtcttcctctactttgctagactcaaactccttcttcctctgtcacccttggttgtcaggctaagtgggaagctggcccaccttccagggtgtactcaggcttatataagaattcctagtatttccctccactgtagggttgccaaatttagcaaatatttgggacaaacttatactaaaaattattttttaattcaaatttaagtggatgttctgtaatctagatttattttttagagacaggatctccctgtgttacccaggctggagtgcagtggctattagcagacatgatcatggtgcactattgcctcaaactcctgggctcagaggattctcccactccagcctcctgagtagctgggactacaggcaccaggctggatgttctgtatttatctggcaaccttaactccacctccatccaccttgacccaaccccagtggcccttcaattagcaatgtttgccaaacttgctatcataaatatccattctgatgtaacagacccaggatccatcccgggaagctttatttttaacaagcacctcaggcaattctcaacaccaaatgagtttgggaggttctagactccagcatgtcactgttgagactaagactacgcgttgagtctctgtataaagcccgcctctttgctagatttatggaccagagagagcacagcaacccaacccgcgtcggtatccaaccctccaagaacacaccctatgcagatgggcccaaaactccgtgctcatccacgttggctgttttcctcttacccagccaagctctcactatacacacccaagagctccggtcctctaggaccaaggggaaagccgagcccaaccagttgtttttccaggcactgccagcttgcctggaacagccaactcaggggaggaagaagaacagagggctctccaaggtttgattattcaaaaaattacctaaaaaatggaccagccagttcacctttggttttttgaagtcaatgtccaaggcattttcagcagttaaacttggcctatccaggggaagccctgctcctctcaagaacaaaatagcatttatgttcaggttacagtccaggattcccacctcccatccctccccggtcaccacattctgtcccatactggggtcctccacccttccttctctccctcctccctcttgctgagggatagttgtagtccttcactaaccttggccccgcctcctttcatgtttatatgccattctcccagggaatatcttactggactttctacctccttccatttgttttctttggtcctagctgcgcccatttcctcactgactgcacccctaattcctaggctggtcctatgtcatgctctgatctaccctgcacctttccctctgccctccccaggcctgccccaggggacaaggagcacaacagtcacccataaatattctacatttgcatctttgaaatctggttatgtgacctaagggctttgtctggtcaggccccagcccacctcagctgcatggctagtccctatacagatcaagagggatgaaaaatgggggatagggagcaggacagaccctccaagaaggttttctttttccccagattctctgggccagagatacctgcattttctcttgctttgggttggaaaggagggaaggaggaaaagggggaagcaccctttgagtgacactagggcttctgtcctgaccttcctctgctcctgaaggctttcggctacccaaggcccccctccccattcagctctctcttcttccagcattcagttgcagaattgcaacttcctggtaaaagaagctttagtaatatcacgatgggaggaaggaggacatagtgaataaggagggaggaggctacatcacactgagcagcccgctcagcccagaggggaggagaacctgcgggggtgggggagaaggtctcatccatgccccccttacaccccttccctagccccagggaatgtttcatttgctaaatgaagttaatgtggcccagatgttgggcagctgcctctggaagcagttcccgtgctgaacggcaaagaggccaaagcaacgtgcggagctggcctctgctgctctggcagccctcctggccggtgataaacacagcctcccagctcccgcccctccccccaggcggccagggaggttgcctttttaggaaactcagcagatctgaaaaagaagcagacagagagactgagggctggattggagcggtcataaaactggagagggctgggacttgttgtgggacagaggaagcctcaggtagctgagccgcagccaggccaggaactcaggtaaccacctgctggccaggccagtgactcagcctgagactctataatcaccgaatctcttcaaccacattcatcttccacccccaccccatcagctcttgccagctccaaatttccatcccagccacaaacatagccattccctcagacacactcattccctagggccccagacacaacaaaccctctgcctagacacaactaaccctttcctgtcccccttccatcctcaccaagtgggcccagctcctttcttcaacacctgtgagaaggaaggaaggaaagaagaagagaaagaaaaatgtaaagccgcggggcccaatcatcaaagagaagggaagagaaaagattttctgactaaacatcaccacacacaagcacaagatttctcttctatttgccttttttaacctctaggaaaaagaagtaagccagcaacccctcccaaccccatccgtacctataccccttgctgcctctccttttgagacctgacgccctgcttccctgggatattccaccccaagaaatgcaagcaaagggctgggcatggtgggtcacacatgaaatcccagcacattgggaggccaaggtaggaggatctcttatgtctagttcaagaccagcctgggcaacatagtgagaccctgtctctaccaaaaaatttaaaataaactgtttttcttaggaaaaaaagcaagcaaagtgtgagaaagggcagcagtggttacagagaggacaggaggtcgagccaaactggcaagggccaggggctatatggtagacttgggttagtattcccagcaacatccccatgacagctcctcaccatgcatcaatgggaaaaattcatcaaagttttgcttagaagggataaggggcatgtgtattcaagagggaggtgataacttcatgggtctgtttctgcacaaaagcagcttagtctggagaagaaacaaggtctggtatctgctccttacctcatcagagcaccaggcacacatggggctcacagccaggcactgctggcaggagctcacacctcgcgtggtacagatgttgggccctgcaacagacagacaaaggcattagcaccagatttggctcagtgaaggtacttgcctgcctcatccttcccaactttcccaatgtccaggtttacagctctcaggtgcacacaaacacaccctaaccataccacagacgtctaccaaatacaggttattggttaggaagaaggaggaggaggaaaatcaggagaaactcatcaccgctctcaactgatgaggccacagtggtaacaagtgacagggcaaggctgagccatggacgcaagtctcagatcgtaactgatggaaaggctttaattaacaactggtttgacacctacattgtgcaaatgaaaatatctccggggcccagaaaaatggcaatgtatcccctcttcagtcattctagtgatattcacagccactacacaggggatccaaggcccagatgcactaacattaacacatagcctaaatacagtgggggcgtggagggtgaggtgactttggtggcagtgtcccactgactggcaaaagaaaagcaaatctgaaatcttctcaagcttctcaatgcatatatcttggaatccaaccacaaaatgctctaggaggaagtgcagaaatgttagaaaaggctgactgatatacactaaaagaacatggaattttagagttggaaggtttgtgcttgaattctgaatgttcttcctgctaactacttcatgaccttgggcaactcaactagcctctatgggatgacaatatctgtctctcaggatttgtacaagaattcagtgaggtaaggggaagcacttggtacactataaggtgctattcaaatgtgaacagtcctcatactgtcaaaggacagagcaaaggctacgaggaggagcagaaacaaccaggagaaccaaaatcaccttgagaagctcagccaggaagccaaacccaggcatctgcttagacagaagccactgtcctctctaattgcctagctcagcattcctgctccagccaggtgaacccttcttcctgcagtgccttaaggaggttttttccaatataaggagcagaatgtgagggatctgttcctctccatgacccagttaccctgacagctccttcatgcagttttccaaagggacctctttgaccccagctggtaagaccagcgaacctattttggagaaatcagcctgaccattgcgatgttttcccagtgtccccaaaacttctcatttagctgtctccattcattttattacagtgtgactgaattccctccttcccaacacctggacaaaaacacactcagaaaatgagggtgtatacacacacacaatattgtaaagaaaaattatggccaggcgtggtggctcatgcctgtaatctccccactttgggaggacgaggcaggcggatcacttgagttcaggagtttgagaccagcctggccaacatggtgaaactccatctctgctaaaaaatacaaaaattagccgggcgtggtggtgcactcctgtaatcccagctactcaggaggctgaggcaggagaatcacttgaaccaaggaggcagaggttgcagttagctgagatcatgccactgcactccagcctgggtgacacagtgagactccatctcagaaaagaaaaaaaaggaaagaaagaaaggaaggaaggagagagaaagaaagaaaagaaagaacgaaagaaagaaagaaagaaagaaagaaggaaagaaagaaagaaaaaaaaagaaagaaagaaagattacataaaatttggaaacaggcaaagaaaatacaaatgtcctttcaatgtaatgcagaatgttgactagctgacccaccatgcttagggattatctgattttctaagagtatgtacctattatttggcttctattaatcaggatattttacaatactgtaagagtagatgttgacctattgaaaaccataaaaacggaaatgatcaccattacactccaaccctgggcaatagtgcgagactctgtctcaaaaaaaagggaaataattcttgatgagaacaatgtatattattcttttaaaaaaaaaatggccaagcgcagtggctcacacctgtaatcccagcactttgggaggccgagaccggcggatcacgaggtcaggagatcaagactatcctggctaacacagtgaaaccctgtctctactaaaatacaaaaaattagccgggtgtggtggcaggcccctgtggtcccagctacttgggaggctgaggcaggagaatggcatgaactcaggaggcggagcttgtggtgagccaagatagtgtcactgcactccagcctgagccagagcaagactccatctcaaaaaaaaaaaaaaaaaaatagccccggtgaggcggctcatgcctgtaatcccagcactttgggaggccgaggcaggtagatcacctgaggtcaggagttcaagaccagcctgaccaacatggtgaaaccccgtctctattaaaaatacaaaaaattagctgggcattggggtgggcgcctgtgatcccagctacttgggaggctactcaggaggggcaggagaatcacttaaacccaggaggcagaggttacagtgagccgatatcatgccactgcactccacctgggcaacaagagcaagactctgtctcaaaataaataaataaataagtgtttgctgtttaagccacccagtttatggcattttgttatagctgctagaactggctaagacaacattttaatctaatcatgatcatattgtggtgtgcaaggtaaattatttagataagagaacaatgtatattattcttatccaacaacaataccaatgatttctgtctggtagaaaaggttatcccccacaggttaaggttcattgccttgcagaatattaaccaattttcaatctattcactaattcatttcagcattcctttgactgatcaaccataaatctcccttctttgaaattccttttgaactactcctaacgtcttactggttctttaattactaaagttgaataaaatcttttacacatattccctttatatttgtgtagaaatcatacttttaactctgttaaaattatatatactttaacagtacccatttcaggaccttacttgggggacaggaggtctaacagaatgggtacacacaatgagtagactgtcatcctaatcgagtcacccactaatagtgtggccatgggtgaatcatttaactcctctcagcctccatttcttcaattctaatattcctaccacatcataataatttatgtgtctgccttaacaacactgccacccaacagattttaagtcccttgagacctgctctgccctgcccagctcagctccagttcttactcagtggagatgctcagtaaatatgcactggggcaaaatgaaaggtaggggaatagatgaagttttgctttgcttttttaagcaactgagctcatttctcaaaattatgcatagaattccaatataaaacatgtaaatgggctacaacaattcctcaggcaatttaaactttcattgttctcccaaaaaccctagattatatgcggaatccttgaagcacctcctggaagccccaggtttcctcagagccttgagtccatctaacttcaaaggccttgcccaactttaaaattctacaagtgggatgcctttatgagcccatgaataacctctggggctccactctccgacttgactacaacttcagaatgtaagcgtgaggcccatgagtgggaatgatgacattggttccaagcctggccttaaagcatcaaggtcacctctgagatggggcagccctgagccatgcaatgtctataatgaaagaaaagtggctgctagtttcagaattcctgaatgttcacaacgaacaatgcaacccaagacttctccctgcatgagctgcctggccatctcttagccttataattgctctcttcccaggcagatgtggacagagcctctcttttttcccctatcagaagacttctgagaggagcacagcctgaactattttaagtatctccctccctttctggagtttccatgggaattggcatgccaaggggtaattctggacataaatgccattgatattcacaagagacagaagcacaagaagacatcaagaagggttagaagagggaagaggaccatgggagatatgagcactgctatggtttggctgtgtctccacccaaaactcatcttgaactgtagtacccataatccccacaggtcatgagagggactcagtgggaggtaatagaatcacagggatgattatcctcatgttgctgttctcctaatagtaagttctcacaagatctgatggtttaataaaaggcttttccccctttgctcagcacttctccatcctgccaccatgtgaagaaggatgtgtttgcttccccttccaccatgattgtaagtttcctgaggccttctcagccatgctaaactgtgagtcaactaaacctctttcttttataaattacctggtattgggtatgtctttattagcagtgtgagaacagactattacagtaaattggcaatggtagagtggagtgctgctataaggataccaaaaatgtggaagtgactttggaactgagtaacaggcagaaattgcaacagtttggagggctcagaagaagacaggaaaatgtgggaaagtttggagcttcctagaaacttggagggctcagaatacaggaagatgtggtaaagtttggaacttcctagagacttgttgaatgactttgaccaaaatgctgacagtgatatggacaatgaagtccaggctgaggtggtctcagaaggagatgaggaacttattgggaactggagtaaaggtcatgcttcctatgctttagcaaagagactggcagcattttgcccctgccctagagctctgtggaatattgaatgtgagagagatgatttaggggatctgtcagatgaaatttctaggcagcaaagcatacagcagcaggaagcagagcataaacgtgtggaaaatttgcagcctgacgatgtgatagaaaagaaaaacccattttctgtggagaaattcaagccagctgcagaaataagtaacgaggagctgaatgttaattaccaagaaaatggggaaaatgtctccagggcatgtcagagaccttcatggtagcccctctcatcacaggcacagaggcctaagaggaaaaaatggtttcctgggctgggcccagggcctccctgctatgtgcagcctaggaacttggtgacctgcatcccagccactctagccatggctaaaagtgaccaacatagagctcaggccatggtttcagaggatacaagccccaagccttggcagcttccatgtggtgttgagcctacaggtgcacagaagtcaagaactgacgtttgggaacctctgcctagatttcagaggatgtatggaaacacctggatgtccaggcagaagtttgctacaaggcagggccctcatggagagcctctgctaggggagtgcacaagggaaatatgggttgaggcccccacatagagccccccactcgggcactgcctagtggagctgtgagcagagggccaccatcctccagaccccagaatggtagatccattgacagcctgcaccatgtgcctggaaaagccacagacattcaatgccagcccatgaaagtggctgggagagaggctgtaccctgcaaagccacaagggtggagctgcccaaagccatgggagaccacctcttgcatcaatatgacctaggtgtgagacatggagtcaaaggagatcattttggagctttaagatttgactgtcctgctggatttcagacttgcgtggggccagtagcctgtttgttttggccaatttctcccatttggaatggctgtatttacccaatgcctccactcccgttgtatctaggaagtaactaatttgctttcaattttacagtctcataggcagaagggacttgccttgtctcagataagactttggacttggactttcaggttaatccttgaatgagttaagatttgaaggaactgttgggaagtcatgattgtgttttgaaatgtgaggacatgagatttgggaggggttggggtgaaatgatatggtttggcagtgtgccccaccccccaaatctcctcttgaattgtagttcccacaatccccatgtgttgtgggagggacctgatgggaggtaattgaatcatgggggcagttacctccatgctgctgttctcatgatagtaagtgagctctcatgagatctgatggttttataaggggcttttctcccttttgcttggcacttatctttcctgccaccatgtgaagaaggacgtgtttgcttccccttccaccatgattgtaagtttcctgaggcctcccaagccatgttgaactgtgagtcaattaaacctctttcctttataaactaccaaatcttggatatgtttttataagcagcatgaaaatgaactaatacagacactgtcagattactttttaggacttttcccagtctattcatttaaccacccattcattctcaaattagcatttccctatgagtccttgacttgtagccacaatagaaagttttgcaagatacaaaataaataacagcaggtccctcccagtgaactaatggtccctgaccccagaggataaaatgaggtgctgggatttgttctttaggaaatcatgcctgcagagtcatggttaccaagtccctttatccactctttttaatgaatcacaggttgattttatgagaaccaatgaaccccccatgatacccccaaccaagtcctgctacccaggcagattccctggaatgcagtggttaaaagtgactgactcatcagaagtctctgcactgagcccatgctgattcaatgagttgttgttctgagcccacccctccctcctgaacgtgtggaaggagtttgggcctctgtttccagtcattcataaagcctatgttcctgctcattctctggggcccagactcattcctgctaaagtgggaatcttcaccataatgtcacttacagaacaaacaactcctacctcctaccacccctttcctctgacaggttagccagaaccagggacaaggtggattgaccccagtcttcacagggtggttgtaaggatgaaataaaccaaaccctgtaaaactctgagcacaacagctggaacacagaaagtactcaataaatgctgctgctgctgctgctgtaatttatattggttttattgttgtttttatcctgagtctcaaattgtttagggcaggtgaatacttttttttccttgatgacatcattctaggggacactagacatgacgttaagtatgccctgagcagaaggagtcgtgggagcgtggagccagaaagtatcacaccagggtgaaatgtttacttgtcagatctggcttctaaatggggttaggaatattagtcttcgaaaatccaggctcatgcctgtaatcccagcattctcggaggccaaggcaggaggattgcttgagcccagtagttggcgactagtctgggcaacatagtgagacccccatctctatgaaaatttttttaaaaattagctgggcatggtagcatgcaccagcagtcccagctactcaggaggctgaggcaggaaaatcagctggacctgggaggttgaggctgcagtgagctgtgattgtgccactgcactccagcctgggcaacaaagtgagaccctgcctcaaaaaagttttttgaaaataacaattttaatccaatcaagaccagccaagaagtttgcctggaaagtagaagtagaaggctgtggtttggcacatcagcttgaatcacagaagcagaagagagacaaagggtgggaaaaatggaagaacaaaggaaacaagggagggaattggatccagtggaagtcataatgcgtcaatgggggctattttgaggacatgttgtccagtgagacaggatgctggactgtaggaacaggccaccctaatgaggacaggggactacaggagagggctaagtcacagtaagaggtgtttatcgagaagggaggatgttccactaacactatggacatctatcactctgccagaaaggagttctaatctgggtccccagccctgccactgacctttgactgctcacttcccaattaggtccatggggacagtgggtgactcacatgatgcctcattgtagtcacctggccatgtgactcatgaaaaaaaaaaatctcatgcttactgtcctacataggcacaagtggtttatctagagcaagttgctaagaaagtttattttaattttggtccttccttaaatgtagcatcagctaagtaacccaaggaaggagaaggagacagggaggtggagtttagggtaacacatacctctgtgctctgagcaaaaagctccagtaagcatcacccaaagcagtagagaacccaggcaccatatttcatcaaatctaacactatgaatatagtatatgtcctgattttagagatttaaaactgtttttaagtatatcagagccagttaagtacggtatttaacattggaaaacatttgtgtataacttgcctccaccaatattaaaatgtgttataagttgacttatgtccccaaaaaagatatgttgaagtccttaccccagtgcccatgaccatgaccttacagagaaatcaggtctttgcagatgtgatcaattgatgtcgttagggtaggccctaatccaacatgactgatgtccttatgagaagaggaaaacaccacacgaagagagagacatatagagagaatgccacatgaggcagagattggagtgatacagccagaaactaaggaacaccaaggattgccagccaacaccagaagataggaaggaggaaggattctacccagagtctcagagggaccatgggcctgctgacaccttaatttcagatttctagcttccaacaagaataaatttctgttgttttatgccacccagtttgtggtgctttgttacaacagccctaagaaactaatacaaaatggatttgcatctccatcatgtatatggcatgattttgaagaacactgccgtgaaatactttgcatgattgaaaaaaagccagcatgaaatgaaatttttgttgcatttaatccacgtatggataaggtttgaaaaatggttactttagctgtacatttttctacctatatatatcaatggtgtcagcattcattgattcattcattcatttactcgacaaatattcattgagcatctacctgtgccaggcactctcctaggcactggagacacactgataaactaaacaaagcccctgctcttgtgaagcttacattttagtgaggaagatggtaacaaaaaatacacaacaaaaatgcacaatttcaaacagtggcaaatgctgtaagaaaataaagcaggataaaggaataacaagcaataaggggaaggactctctttagagcatgtgatcagaaaaggtctctctgtggagctgacatttcaaaatgatgttaaagagtgaatcctgggacgatccaaggcacagacattccagaaagaacccaaggcaagatctggatggacatcagcctgttaaagaaatagcaggtggagagaaaggaggaagagaaaagcacagaggaggttagaggagcagttagggaccagaacactaggaagctataggccatggtagagagtgtggcttttttctccacatagtgggaagccactggaggaatctgagcagaggtgagcaaaaaaagatcatcctggctgctgagtgcaagacagaaagaagggaagcaaaaaggaaagagacttattattcaattagaaatgtactaaaataatccaggcaacagatggcagtggatttggacagtagcggagccactgatgtggtcagactctagatacgttccatctaaagacttgctgatggatggctcatggggcatgagggtgtgaacaaatgtgaacctgaaagagccagtccttcaagatagatctggagtggctaagtgggcctaaattttaaacagagcaaagctgccatttgctgactagaggtcacaacccactttgagttccctgaaaatcaacacctctcttcaactttgggacctccagagctaacctaaaataaccagtcagggctctgctgccttgaccaatcaggcctcagttgtttcaaccaaacagaactaagcaagttggaattgttcatttgcataagtggacctcatcaggatcctaggcaggaactttcattataaacccccaattctgacaccaacagctgagtttccccagtttccaaactgttcattggaataaagtctttcctcccaattccttttcagagaacttttgttcacaagggaaaaacaggaaggatttttgtctgagcaaggggattccctgtacacaaagttcaaatgtcttgaccactggccatatcctttcattgacccttcatgctgtaagaaaataaagcaggataggccgggcatggtggctaacactgtaatctgagcactgtgggaggccaaggcgggtagatcacctgaggtcaggagttcaagaccagcctggccaacatggcgaaatccagtctttactaaaactagaaaaattagctgggcatggtggcacgcacctgtaatcccagctacttgggaggctgaggcaggagaattgcttgaacatgggaggcggagtttgcagtgagccaagatcgtgccactgcactccagcctgtgtgatggagtgagactctgcctcaaagggaaaagaaagggtgggggtggggggggcggggaatagcaagcaatgagggaaggagtctcctttaaagcatgtggtcaggaaaggtctctctgtggagctgacacttcaagatgatgttaatgggaagatctagggcaggtcctgtccttgtaaatgaagccacattatgtctggttatcatctccaatgaggttaattaggtcgccatgtgctgaagactgcataaagcccattccagggacagagtcctgtcttctctaaggttgtggtctaaaattaacacccagctcctgagaaatgtggtaaggcaggagcagtaaaacaacagatggatatggcagaaaaagcatgcaaagcagcaggaaacctcacgtctaaagccatctttgcccttcctctggccgtatgacctcaagtacatcccttcatctctctggtgctctctccaaggcccagtgcctctttgagtctatgtcacattcatagtcgagaagtgataactgctctgtagtatttaacgggtctaaccagccacatcggccaagcaccggagactccaaacagctgcttcctttccccagtgctcccgagttgttaggattaaatgacataacacgtatgaaagaaccctctatagtggatgctcaataaatgttcatttccttcccccttactttcactctagtcacttcctacaccaggaatccccatcccctcgcctccacctcagggtcagacgtgaaagggccctttgtctctaacaggatatagtgaagaaatcactctgggcaggagacaagagtccccagggagagacccaaccaatgccactgagccagttgtatgatcttggacaagtcacttcacttctcaggaactccctttttgcttttttgtaaaacaaacaggtgtcaaatttgatgatcttcaaggtgctgccagtcctggaagtatccactcttccagccagaaaacatcaacagggggactcataccctaggaagcctagcaacccaaggcatgagaaccctcaaacaaggcacaagtggccatttcttcctgatggcctgatatttgactcaaacgctgcatctcaagagttctggaaatttttattagcatcgaccccacctcattcagtatacagaagaagcaggtctgtaccaagctgtccgaggctcagcccaggggtgccctattggtgacctccttggcatcctgctgtccagttctgcagccttcctcccccagctcatgtgttatgggtgtggacagcaggccgcggtgctaacaccagtccttactgccagcctgtcttggtaggaaagcaaactggttcaaccgtttgggaggacaaattgacaacacctactaaaatttaaatttaaaatacgcatgcccttcgacccaccaactttcattcaagaaattaagtctgtagaaacacttgaacaaaggtgcataataaatgaataaggatatcccctgcagctttatttgtagtagcaaataattgggaatgatcccaatgtctgccaacagggaattggttaagtaaattctgatatatccatataacaaagagtatgccttatggctagaattatagctcttgggataaataatggaaagccataaactgacataaaaagatgcctagagtatattattaagagacaatgggccaggtgcggtggcttatgcgtgtaatcccagcactttgggaggccgaggcgggtggatcacctgtggttaggagttcaaaaccagcctggccaacatggccaaaccctgtctctatcaaaaacacaaaaattagctgggcgtggtggcaaatgcctgtgatcccagctactcgggaatctgaggcaggagaattgcttgaacccaggaggcggaggttgcagtgagctgggatcacacaactgcactccagcctgggcgacagagtgagactccatctcaaaaaaaaaaaaaaaaaagacaatgatcctattattgattatcctatttgagaaataacaataatgataaataattatatatgttgacaaatacatagaaaaaaactctgcagtaactatcaacagtggttatctttaaggacaagactacaaggaactggtactggtactttctgcattatatttctgagctgcctttttttaaataataagcttaattacttttataagctaaaagaaaattaaagctaatttgaaatgtcctctgttctgcctccctgtcgacatttgcatttatttaaatgtaggctccccagagtctgctgggctttccacaaactgcaccttcagcatcaaaacctcttggaatggcaaactcagcaggaacacagaaatgagctttggggtatggtttgcatgaggagatgctggtcaagggatataaattttcagttagacaagaggaataagttcaagagatccactgtacaacatggtgactatagttaataaccgtatgtcatctacctgaaaattgctgggaggagatttttaagtgttctcaccacaaataaatcagaagtatgtatgtgaggtaatgcatatgttatttaacttcatttaaccattccacaatgcgcacatatttcaagacatcatgttgtacatcataaatatacataatttttatttgtcaatttcaaacaataataataataaaagagaatggaaaaaaaaaaaggaataaactttgtcaggcccactctcacagccttcaagaactgcccagggcagcatggtctgttctcaacttgtggaagtcccagaaaggaaacaccaccctcccctccactggggattggtcaaacatgctccttgcaggcggctccagcaaaggctcaacctggagttcaacacgtgcgatggctaaagttggggtctggagccatcagtggatctcacagacccaggtttctctatccaaaatttccattagcaaagagatgtagggttgactacagggactttttaagtggctactgaatatgtcttttgccaaacttctggagctctcttctagtgcaaagtttttcaagcttgattttaacagcaggatcttctttttttcccaaagaaatccttacatgaactccaaattgttaattagttaaaggagttccagttgaaggtggtggggaaggggcaggagcaaattgaagtatttcccttcatcttctctgtcccactttgcagcccctgggacaccaagagactgatgcctaaaggtaaagtcacttgttcaaagtcacccagcaagctgatgaaaaagcctgcagaactgtgaatcgaatgtaggtttcttaattccagatacgttgttctttccacactgagcttttttctatataaaaggaagtactatatatcatgggtttaagtaaaggaatacacacacacacacaaataaacataaatgcgaggggaaatgtctaaacagaacacaccacctgattaatatgaacattataggggaatagaattagaagggaaccagcaattttaacgactgacaatgatcctatgtggatgaacctatttgagaaataacaatatttgttttgttttgttctgttttttgagacagagttttgctcttgttgctcaggctggagtgcaatggcacaatctcggctcactgcaacctctgcctcctgggttcaagcgattctcctgcctcagcctcccgagtagctgggattacagacgcatgccaccatgcccagctgattttgtatttttagtagagacagggtttctccatgttggtcaggctggtcttgaactcctgacctcaggtgatccgcccgcctcggcctcccaaagtgctgggattacaggcatgagccaccgcgcccagccaagaaataacaatatttgttattttgacttttttaaaatgtgtatcaccttgttctttttctttctctccttgaatatttaaacatcttcactaactgaactaagaaattgaactaactcaactataaaaccgagagaggggggtaagtaaatagtcttttcatgggaacatgacagaaaaacagaaataagacatctagtgttagatctagtgttagaatttgtctagcaagctttctggttttggccaaaaagccacccacccacccaccctcccaaaaaaaaggaaaaaaaaaaagtcaagtgggttgttttttcagagatgctaccaaaaatgtaaaaaggtagaatagcccccaggtttacttaacaacttctgactccaagcatcatgacatacaatatttggccacaaaatatctgttactcctatgagcaagaataataagtgttggttgctacagaatcctctctagtatcctgaagtctttaactacttagcacatggaaaatctaatgacttatatatagctaaatacatctatccaattataaaatttagaagctgaaagctggggagcacctccaaagtttaacggatccagtcccactgctttcagggtaactgttccaacacggaggatgacggagtggcctcagacaatgtcttagagttactgatagatgcagcatcatagattaaccccaaatgtattgtgctaagtgaaagaagccagactgaaagtctatacactgcatgctttcatttatatgacattttgtaaaacatagaactgcagggacaggaaatagatcagcagttgcaaccgacgagggttgagggtagggtatcgattacaaaagagctgggggggcacctggcacagtagctcacgcctgtaatcccaacactttgggaggccgaggtgggcagattgcctgagctcagaagttcgagaccagcctgggcaatatggtgagaccctgcctctagaaagaaaaagaagggaaaaaaagagcttgggggaattttaggggatgatggaaaaattctgtatcttgatgatggcaatggttacttgactatatgcatttgtcaaaattcatagaactgtatgcactaaaaagggtgaattttactgtacataaattatacctgaattatctaacaaaaaaaaaaaaagagtgtttttggtgagactgtgtgtgtggacagaaaggcagatgctatcacttttttgctggagagtctcacgtttcaataaatgccagcagttcccacacggggaataggcagttcccctaaacagagtcatttccctgctcccaccttcatttccactagtggcctgagctccatcaggcacaatgaaggtcccactcaggaagggccaaggttcaggaagagggagcagaggcgatggggtggagcagcccactctgtgggcagcagagagggctgggtaaaacgaagcggttcatccctgaagctgctcagtcactccctcggttaattatctgtcttctgattcatgagttgtggttcctgtgggcatgcttcctggagatttctgccaacaagggaagaagggttcttgggactgggaggggatgataacctcagatcccaagtagggtggggagctttagaggagaaatttcgatcaggaaattctaaagtcatagccagactccccctcctcactgtggtgtgcttgccccatcttatggtcttcccaggagacctctgtcactcctcacccttgccccaacacccacacgtccaagggggagaaaggagaatgttgcccttctaacggctcctcccaggagggaaaaaaaggcagacactttacagaggatcccttgagtttttcacactctcagatcacaggtctaaatggtgcaacagtgcagcggcccaaatgcccaaagaattcatgatcttggctatgttttcataccctccagattatccaaacggagcacttgaggatcttgtatgaatgagtgcaaatattcaaatattgggtttcttaaagggaggcacatcatctatagatgcctttacatagcattccacagatatttgttttgctgcctatgtgccaggcagtgggcatagagtattgaacaaaatagacatgtccctcttctcatggaacttgaagtcttatagatccttttatcttcctcttttttcagatacagggcttgaggttttcttatgggtaaagcaaatgtataagcctttttccttcttggcttcttctgtggattcttgccgggttagagtagctgagatatgccaaaccagcaatgaggaacgagttgaaataagagggaccccctctcacatatgtgggggaaagggaccccatcagtttcattctggaagcctgcatagcgcatatgcatgaagtagtaacagcttttgcctccaatacatggcagatagcatggataggaagaataatgacaatagtagttgtcattcattaaacacttattttgtgcctctgtttcatttaatcagcataatcataggcattgtttcctctgccttacaaatgaggaaactgaggactcaagagattaggtaacttatttaaggccacacagcctacaggagacaaagtcaagaatcaaacccacatcttactggctttaaaccatagccctccctttccgaagccaacaagccttcctgctgtgtttctccaggacctgaggatacctgcagagggcttcgattggagagcttctaggatataaactccagaagagaaataagcacctcagcttagacctaattaggtcagaataaaaacctaaacacgaggaagacacaaaacccatacttcctgggtgaagctaaaaagatcatctttgtacataaaatgaaaaacttgatgctatcctcagtcaatctctcttctccccaaagcagactccgctactctgggacaacctctctgtgccactcagctctttctgtgccccttcaacacttggagtcccaacacaactctcctactctcatcccaccatctgcttccccagggatctgaagaccctaccaccaacactgggatggcagatataaatatagtagaaactgatttgtgaggttgggggggggggtattactctggaagtctgactttagagcccctgcccttaaacactactgtacactgcttctcagagagagtgtggggctagctcagcacaacccattaccacttctggaatcgccccaatcacaagattaatctgtgaacagatcgcctaaggatttttttttaatttttagtagagattaggtctcactatgttgcccaagctggtctcgaactcctgggctcaagcaatccttctacctccacttcccaaagtgctgggattacaggcgtgagccaccgtgcctgaccagatatcttaaaggatcttttaatgcaaacttacgtatgtcaatgcagtggaatccaatacactccaaagtgaatttagaagactgtgaatgtgaaaattttttaatgacagcaaaaattgtcgtaagtgcatggaagcaagcatctcatcctggacaggacaaggataccctttttttaattatgtatttatttatttatttatttatttatttttactgagttgccctggtggatttctccattcccggcatcaatagccagcagcatctgacccaaggctccacatgtcccagggcagaatgctggagattcttatttctgtgtcatagtcatcagactgctcactgcacgctaacactatcagctgatctgttttagtcccagtcacataggaaatgcagcaataaccactgcaatattcctctacatatcaactgtaatccctccttcaagatacccttggccgggtgcggtggctcacgcctgtaatcccagcactttgggaggccaaggcaggctgatcacggggtcaagagatcgagatcatcctggccaacatggggaaatcccgtctctactaaaaatacaaaaattagtagggcgtggtggtgcgtgcctgtaatcccagctactcgggaggctgaggcaggagaatcccttgaacccgggaagcggaggttgcagtgagctgaaatcgcgccactgcactctagcctggcgacagcgagagtccatctcaaaacaaacaaacaaacaaaaaaagatatccttgccctgtccagaatgagttatacgtctatacatacacagaagagtcttgacgggaatcactaaagtattttcgaatagtttatctttgaagtgaatttatcaacaaatcttccctttttaaaataaatcctggccaggtgcggtggctcacgcctgtattcccagcactttgggaggctgaggtgggcggatcacttgaggccaggagctccagaccagcctggccaacatggtgaaaccgcgtctctactaaaaatacaaaaattagccggccgtggtggcaggcgcctgtaatcccagctactcgggaggctgagccagaagaatcgcttaaacccaggaggcagaagttgcagtgagccgagaacccaccactgcactccagcctgggcgacagagcaagactccgtctcaaaaataaataaataaataaataaataataaaataaaataacaaatcccttctgcagggtgtagattgttttacgagtactacagtttttattaaaaatacttacatgcactcttgtgtcatcctctgaggcagaggcggccccagcagaccaggagccagggtttctctccagcccaggcaaaatcaccaaggactcagagaggaccacgggcagcaaccccgggctgtgcccgctccatccctccacctgtgtccccagtaccaaagaggccgaatgccaattgccctgacggctgacggtgtgcgcagcagccagagacaaagccaaggatcccaccggcccaagggagccttttcatggctccccgaatacactagagatttttcgggtgcagggtctgccctgggagcagaggcaccgctgccacctggggacactggaggaggcaaagccctcatcctgctccaaaacaaccccgcaggaagccaagttgaaggtaaaaaaaagaaagaaagaaagaaaaaaggaaaagaaaaaaccttctggagaaagcgtaacaggagaaattggaaatgtggggaaactggcaaacccgcgcgcgcgcacgctctcacccaggaagctacagcggcatccctctgccaaggcgcgggaacaacccccggaagccccacctcgccttggctcctgggccagtcgtccttggcccgaccaggaccacccgcgacgcgcgcagccccgggtgagcgcggggctcagagatgcgcccaccgcaccgtgcgcgccgcggcggccgggaaggcgctcagcctggctgatggcttcggcgtctcggaggacccgctcccaggcaccaggcacctctcagccccgccaccgccgggccaggaaggtccccagctcccggctccgaccgcgccagccaggacacgcgcattcccagcgcagacgcgcgggaccagccctccgcgtttgccggctccaagtccgcaacttgaccggggcgcagatcctggggcagctgcgacgctgccgagccggagcctcactcacctcctacgccaacgcccgccagcgcccccagcgccagcacagtcgcccagagcggccggggccgcggccgcgctcgcatctcgtccgcctcccgcggcgctccgcccgccccacagtgggcgccgccgcccgcggccgcttttcccgcagcgggaggggaggggaggggacgcggtgggtgggacgcaacggggcgggccgcggactcgcgcttcctcccctccggcttctctagatcccctcgcgcttctctagaccctgcgcctgagagggagcggtgggaaactattgctcctctctcgccgcctccctcgcctcgcccacgaggacccgcctgccagccgggtcgtcagcgcatcctggtcccgggggtccgcgactgggcacttggtgtgcttagaaaggccaggagcctgtggcccctctccggacccttccagtcccgcctcctgggagaccctgtttcgctggattcttgggacacattcacccactacctcgagtttcattcattcacactttaattcatttgactggcaaacatctgctgaatgccttctctgaaccggttcagtcctttattattcactaatttttttcttgccttagtttggttttccggtagactacctacctgttgagggcaagaccacatcccaagcttgcgtaagcagtgataggtccatgaagagcctcgccctacaaacacttgcttgcacctagccagtgtctgaaaacgtttcagaacacagcatattgcctccaaattcacactcacaggctttgggactttatctattttcctcaaaggcctcctgcctgactcccccaaactgtggccccttatctcccaccccaatctttctttgagtccctgggtcttccccagacttaaaacctctggaagctcagagaggcaaaatactatggctatgagcaagagggcaccaggaagtagctggtagtgcagcctgcctcaatgggtagtcctgatggtgataaaaacaaggccagaggcatcagttcccctttagggctttcagagtggccctgggcttccctacgcagcgtgcccaccctcttctgagacacacaagatgccagacaactggccctgacccatctctccagcccatctcccaccctagtccaagaagatacttgtcattccccaatgctccatgccttcctatctgactgattttccttcctttttccacttggaaaattccacttatctttcaaaacatctcagatgccatctttttccatgtaatttttttctgacaatcctccacctcctgccccaccctcccaaacactaggaccttaatagtaacacacatcagctgaagcgtcactagcaatttgcaaggggaaaagccagctctgcaaagggtacttgggccctctgacctgggttttcaggctgaagctccatctacctcccctggctgcagagggcctctaggccagaagcattttaacagcagtgtcaatgccctggagcaaagttcaggtcacatggcctggttacatctctgcctaagtatttagttatctgctccattcccatatatataaaaccaatctccagccacttaggtgtctccttagcctatccctgctgtcagcaaccacttggggtgggcactggcctcagcaagtatgctaagtccacaaccctagcccaagccctagcaaacatgacataattgtgcaagtgagtccatcctgcactcccagccccagggaaggcaaaggagctagtccattcacatttagtatagtaattgatggttgtgtttacatttactatcttgttattcgttctatctttttggctggtttctctgtttctctttttctgctttcttttgggataatttttttttctctactggcttcctagctacacctcgtttgcatgtgtgtgtgtgtgtgtgtgtgtgtgtgtgtgtgtttgctctaggtattacaatattcctccttaacttatcatacagtagcctatgttgaattaatattgaacaattctatgtaaattgtaagaacctgtaaactaaaaataacattataagcccccccacaactgtctgaactaacccttcctctcagccaagggcattccaaagttaatctgaaaaactagttcagaccatgatgtgaagcaggtttggggaaggtggagggggggtggtggttgaatatgcctcacagctgaccagcattagcatcaacacaaagaccttaaggctgatagaatagactctctaagtctgataagaaacattaacagtctattctgtctgaagcctctggcttcatctgcatgataaaagtttggtctccacaaccctttatcctaactcagacattcctttctgttggttctaggtctttagataataacacttacaaccaattgccaatgaaaaaatctttgaatccgtctctaacctggaagtccctgtgtcagatgtcctgcctttctggactgaaccaatgttcaatgtacatgtattgattgatgtcttttgtctccctaaaatgtataaaactgagctgtagcctgaccaccttgggcacgtgtcttcaggacttcctgaggctatgtcatgggcatgtgcttaaccttggccaaataaacttctaaattgattgagacttgtctcttcaagtacattaaagatggtctgctgtttgctgtctccatcatctctggtgagaagtctgccatcctttatattcttgtttctctttcttctcctcctggatttttttccctaactttttattttgaaatcattaatacttacagaagagttacaaaatactaaagagagttttcttatgtccttcacccagcttcccctaacgttcacatcttacatttctacatcataattatcaaacacaggaaattaacatcgatataatactatcaattcatctagctacagaatttgaattttaccattttttttcccattaatgttctttttctggtccaggatctaatccattgtatttagtcatcatgtctccttagttggcctcaatctgtgacattttctcagtctttctcattcatcactttgacacttttgaaaagtctaggccagccgggtgtggtagctaatgcctataatcccagcactttgggaggccaaggcaggtggatcacttgaggtcaggagttcaagaccagcctggccaagatggcgaaacgctatccctactaaaaatacaaaaaagggccaggcgtggtggctcatacctgtaatcccagcactttgggaggccaagatgggcagatcacctgaggtcaggagtttgaggtcagcctggccaacatggtgaaaccctatctctaccaaaaatacaaaaaattagccaggcatcatggcaggcacttgtaatcccagctacttaggaggctgagacaggagaatcgcttgaacctgggaggcggagttgcagtgagccaagatcacaccactgcacatcagcctcggtgacagagcaagactccgtcatacacacacatacacacaaattagctgggcatggtggtacgtgcctgtagtcccagctacttgggaggctgaggcaggagaatcacttgaacctgggaggcagaggttgctgtgagccgagattgcaccgctgcactccagcctgggtgacagaggaagactccatctcaaaaagaaaaaaaaagaaaagaaaagtctaggccagttttttgtagtattttgtttatttggggcttgtctgttgttttctcattttggacaataataccacaaaaatgatgttgtgccttctcagtacatcatatcaaggagtatatgatgttgatatggcttattactttgatcacattgttaaggtggtgtctgccaggtttattcactataaagctaccatttctgtgaatgacagggccttagcagatggataataaaaagtaaaaaaatacaaaaaaaaagctaccatttttctctttgtaatcaatacatatttaatgggaggatactttaattttatgcaaatatcataatggtttcataatttcacccactaattttatcatccattgatgattcttaactgcaacaattattactgtggcatttgattcacagtgattttctattttcctttttcttatacagttattaattaacattcaacagtaaagaagagctgtcccttctcttccactttaaaatttgtttatttatgtcagtataaactcacagatatttattttattgcaggactgataatccagtactatcattattatgctgctcaaattgtcccaggtttttctctagctactctattcaacatcatctagatgtcgtctatctatttggagacagttttcaaatcctttctaagatttatgttctctaggtgatatgaccccaatttattttattttattttattttattttatttcatttcatttcatttttgacacaggatcttgctctgttgcccaggctagagtgcagtgacatgatcatagctgattgtagccttgaactcctgggctaaagcaatcctcctactccagcctcctcagtatctaggactataggcacacaccaccacatccagataatttttaaattctttgtagagacagagtcttcctatgttgcccaggcttgtctcaaactcctggcctcaagtgatcttcctgccttggcctcttaaagtcctgggattacaggcatgagacactatgcctagccttctccagttacttttaagttctttatcttttttttttttttgagatggagtcttgctctgtcacccaggctggagtacagtggtgcaatctctgctcactgcaacctctgcctcccaggttcaagcaattctcctgcctcagcctcccaagtagctgggattacaggcacccgctgccacgcccagctaatttttgtatttttagtagagacagggtttcgccgtgttggccaggctggactcaaactcctgacctcaggtcacccacccgccttggcctcccaaagtgctgggattgcaggcatgcaccaccatgcccagctctttctttatctttggtttctcagcagcttaactaaaaggtgattaggtgctgttttattttatttatctagcttacagtctggtgtgatttatggatatataagtggtttacttttcctcacatgtaggttatttttagccattatttctcaaaatactattttctacacattttctctctgcttacctgctgaaactccaattacacatattttagactatctgattttattccacaaaccactgcagtttaggtcttttttaaattactttttctgtctttcagattaaatagtctattgatatctcttaagtttctcaatcctttcttttgcagtctctaatattctgtgatgcctatccaggagaattttcctttcagacattatacttgtaagttctagaatttccattagttctcttctatactggcaatttatctgctgatattcccccatctcttcaaccattatgcctatatttttctttaagtccttaaacatgtttacagcagttgttttaaaattctagtttgctaattctagttcatctcaaggtttgtttctattgatttcctttttcaggaaaaattatgggtccctatgtacctataatcccagttactcaggaggctgaagtgggaggatcacttgaggccaggagtttgagaccagcctgaacaacatagcaacaccccatctcttaaacagcctgaacaacatagcaagatgccatctctttaaaaaaaagtaacaaaaaaaattatgcatcccattttccttcttcttgacatgtctagtaatattaggttttatagtgaaacattgtggactactgattttgagtttacgttgtcttttcttgaagagtattgagttttgtcctattaagcagttaggccaagtatggtggcttatgcctgcaatcctagcagtttgggaggccgaggaagaagaatcatttaagcccaggaggttgaggttgcagtgagctatatcatgccactgcactctggcctgggtgacagagtgggaccctgtctctaaaaataaatgaataaataaataatctgttaaattagtaccagattgtcttgatctagtcaggcttagttttattcttcatcagaaatggcctttttaaattttatccttggtcttaaagtgtggtttcttgttcttcttgttgttgttgttgttcattgtttctaaattataattttagccaaaagaatattcttacatagaaaacgtgtggatccagaatctatttctttcatcaaatgtcatttcaagttaactctaacttttaatatactttattttttttagagcagctttacattcacagcaaaatgtagtggaaagcacagagttcccacacacgcccctgcgccacacatggagagcaacccccattatccatcccccaccagagtggtacatttgctacaactgaggaacctacattgacacatcattatcacccaacattcacagtttacatgaagttcacccttgatgttatacattttatgggtttggacaatttttttttttttttttttgagacagaatctcgctgtgtcgcccaggctggagtgcagtggcaccatcttggctcactgcaacctctgcttcctgggttcaagcaattctcctgcctcagcctcccaagtggctgggattacaggcacccactgccatgcccagctaatttttgtattattagtggagacggggttgcaccacgttggccaggatggtttcgaactcctgacctcaggtgatctgcccgccttggcctcccaaaatgctgagattacagacgtgagccaccgcacccggctggacaaatttataaatatgtgtatctaccattatagtattatagtcccctagaatcgtttcactgccctaaaacttctctgtgctctaaatatttatccctccttccctccaatccctggaaacgactgacctttctactgtctccagggtttttctttctccagattgtcatatagttggaatcatatagtgtatagtcctttcaggctggcttctttcacttagtaatatgtagttaaggttcctccctgtcttttcatggctcaatagctcatttctttttagcactgaataatatcccattgtctggaggtactacagtttatttacccattcacctactaaaggatatcttgcttccaagttttggcaattttgaataaagctgcttataaacactatgtgcagatttttgtgtggacatcagtgttccggattttggccattctaacaggcgtgtagtagcattttattattgttttacttcatatttctctgatgatatatgatgtagagcatctttcatatgtttatttgcttcttgtataccttcaaggagtgtttttttactattgaacgtggtccttcctcctaaggcatggattttctggagtgtaatctgaggacccaagttgctcaatgagatttattcattctggctaagccgaaactccaacatctgcaagccatgtacagcctctagtgacctgttcagctctcagctgctctctgaaaaaccttagggagtctcaccctgtgtatatcagcccatccctcatccaaagaccatgcagaacacccatgcaaacttctgggagcacctctgtgttcagttccttcctctctaaaagccttccttgcaaattacatcttcctcagcagccctgaattctaatctatgcctcttctgcccaatgagaccaacatgtacttcttgagcttctggattgcagtgcaacccagaaaatgtcccaatgcagaaagctgggcagatatagggttgagctcatgtgttctctcttccttcaaggattataattctgctctgcctattgctccatttctaaaaggagttctttaaatattttttcaaaatgttttgttgtttcctgtgggagagcaagtcccatactagtcactttgccatagccaaaagcaaaggttctgtgattacttatttacttacctccacctcttctaccaatactggacagcaagatgttttgagtgccaggacttatttatatttcctagcaagctctcaacaaataaaagagtatcttcctatttgtttaccgttttcattttaacagactacctatccagcacatatgttgggagacctgagtgtccactctttgatttgcccaagtgccatgctccctagcagataggaccagggaggggtatccaatgcatggcaggtggaagatctttcccaagatccgtttacaaggcaagagtcacattatctggtcccttgccccactgtgccaggctgataccaaaataggtatgcttttcctgtgttctcattaatagtctgccccaacccggggcagctcctgctcctattcagttccttattgtcaccactataagttttgtggccaggtttgtggccgtttctcgaacctcttaccttcatggtcatgtttaattcccctttgtacaaagagccaaaaggtctagattcacatccttgcctcatcttttactagttagatgaccttgaaaaagtctccaaatcctctctacattcatcttctttatctgtaaaaaatacactgcctgtttcctgcctttttcccacccccaattttagccttccccctcccaacacacacacatggatatgaggttccattagaccatggatatacgaaagccctttggaatctggaaagcacagaggcatgtgttattattattgttatttgtagagagactgcagagaagaccaagtgtggctcagaatcttctcctcctacacatttggcagagactcttctgtccattgagaaagggatgacccagctgttcttttggcttacaggagaatgggcttttcagagtccacactgactaaaaatggcgtacctggactttatgggctctggggagctacttgaaaactatccctagttttttatcaaggaagttgtggagggatgagctcagccttggcattcaacattcattcataagcatgtactaagcatatgcagcatgccaggtgcttctctggatgctgaggccttaatagtaaagaacaacaggcccggccctcctagcacttgagcctggttgggcctggtgctctgtcttggagtgcaactccttcctcatcctcatgtgaggcagcccttcctctgctgagaagaaaacgtgtgaagctcagggccataccaaacgcatcctgtgcccactgatggcagccgtgacctacatggagaaacaggacttccgcatgtacctcctgagccacaaggagctgggaagccagcgtggctatgcccacactgtgatggatgagttgctgatctcgtgctgggcggtcaactgcctcctcatcctccctctcctctggcctggtgccctcctcactctcacctacacctggggcctacactggctggctcccacggtactgtggctgtaatgtgcccagccctggggggctgtgcagagctacatcctccctgcaggcggcagttgctatgtaaattaatcttgtacatgttgggtgtgcgttctgtaacctcttccccttccctctcaaccacaccatatgaattatacaaaatatttctgttgaactaggactgtcctttccttggcttttatacatattaaacagttgtgaatctagaaagaagaaaggaaggaaggaaggaaagaaggaaagaaggaaggaaggggagagagagagagaaagaaagaaggaaagaaagaaaggaaggaagaaagaaagaaaaaaaagaaaggagggagggagagaaggaaggaaggaagggaaagagagagaaaagaagagagagagagaaagaaggaaagaaagagaaaaaagagagaaagaaagagagagagaaaaagagagaaaagagagagaagaaagagaaaggaaggaaggaagaaagaaagaaaaaaaaagaaaagaaaaggaaaagaaaagaaaagaagtgaagtgaagccaaggactttccatcccagctcagcaaacaaggtactgcctggccaagcctagattcaagctctgtgcccacaaagggcatcactgcccatgctccatctcagaccaatccatgcctcttccccatccaaccccggaataatggagctactgcttggcttctggccccaagctcctgttctagtatccctctaaatcccccgtcgccctccttgggaccctgctccagtgaattcaaacttgcagctggctccagacatttctctcagccctctctgacattccctatttggttttttttttttttttgagttggagttttgctcttgtcacccaggctggagtgcaatggtgcgatcttggctcactgcaacctctgcctcctgggttcaagcgattctcctgcctcagcctcctgagtagctgggattacaggcacccaccaccacacccggctaatttgtttgtatttttagtagagacagggtttcaccatgttggccaggctggtctcgaactcctgacctcaagtgatccacccgcctttgcctcccaaagtgctgggattacagttgtgagcccagccttcttatttgtattcttaaaagacaggtttgaatcctagagcctccatttcctagctgagggaccctggcaagttactagactgccctaagcctccatttcctcatctatgaaatagagttagaagggacatgatggctcatacctgtaatcccagtgcttggggaggctgaggcaggaggatcacttgagcccaggagttcaagaccagcctgagaatcgaagcaagacttcatctctacggaaatgtttaaaaattagctgggtgcactggcacacacctgtagtcctagctacttgggaggctgaggtgggaggactgcttcagccacttagcacagtaattagcatgtaataagtattcaataaatggtgggcatggtgactcacacctataatccctgtgtgggagattttaggtgtgagcattgtgggaggccaaggagaggatcccttgagcccaagagtttaaaaccagcctggacaacatggtgaaaccccatctctaaaagtaagtaagtaagtaaataaataaacaaataaataagagctattttttcctcttaggatcaactcatctatgctggtttaatctacccccacattctgcctacgagtcaggatacctactgattttcattgttgctgcccatctctagctccctggacaatgttggctgaatggaggcaggaggaggttgcatactgtctgggtactgtctttaccagtcaaactgagcatcctctgacagctcctggatcaggtcctgtgccctgtgccaacccacgggtggatctagtgtctagtccttgggcttaattagtgctgctgggacaagtccaccaggtttcttcacctgaagtcccttgatgagttcctggggatctgtgaggcccctctaatatgcaaacatttgtgtgatatgcatttttctatagaaatgctccttagttttcactagcttctcaaacgggtctgtgacctctagggttaacaacaattgttccaccttcttaaagaactaaaagtagatctaccactccatccagcaatctcactactgggtatctacccaaaggaaaagaagtcattgcatcaaaaagacacctgcatgcgtaggtttatcacagcacaattcacaactgcaaagatacggaatcaacctaagtacctatcaactgatgagtggataaagaaaatgtagtagttgggcatggtggctcatgcctgtaatcccagcactttgggaggccgaggcgggtggatcacctgagatcaggggttcgagaccagcccggccaacatggtgaaaccccgtgtctactaaaaatacaaaagttagctggggatggaggtgcacacctgtaaccacaactactcgggaggctgagggaggagaaccacttgaacctgggaggcagaggttgcagtgagccaagattgcaccattgcactccagcctggacgacagagcgagtgtcggtctcaaaaataaaaaagaaaatgtggtatatagacatcatggaatactactcagccataaaaaggaaggacataatgtattttgcagtaacttggatggagctggaggccatcattctaagtgaagtaattcaggagtggaaaaccaaatactgtatgttctcacttataagtgggagctaagctatgggtatgcaaaggcaaacagagtggtataatggactttggagactcagaagggggaaggttgagggggttgagggataaaaaaaacacatattgggtacaatatatactacccaggtgatgggtgcagtaaaatatcagacttcaccattatacaattcatccatataatcaaaaaccacttgtactccaaaagctattgaaatttttaaaaacatatctataataagaaaaaaaaagaacaattgctccagaggaatcctaggatctagaacaccatgaggctagtttgggccactgaggactcaggaaggcccttgctatagccaatacccacactgtcagctatctgctttcactactccagcctgccactcaccagcttctctggagtagcaggacctagtcagttctcccaaatctgcctgaattcagtgccagtccattgtccagtccccgacatttctactcagcagagggggttaactccacaggtctactccagccagggactgacctcccttcccccaaccccacttcccctcagcacatgagctgctgacccaggtcctcttccccagcgtctggctttcctccatgggaaggaactagaatttgagaacacctaccatataccaccttctatacaaatattgcaaatattgattatttccctcaatcctcattttatagaggtgcaaactgaagcttggtgggcgaagagacagtgatgatgatgatgatgatgattttactagatgccatttattttgaggttagtgtgttcaagatactatgctaagcattctttcatacttttcttttttttagtctgcggtaagatacgtggggaaatcctgattttacaagtgaaaaaatggaggcacagagagatgaggtaattagctcaagagcaccagggagttagtggcaaagatggggttcagaaaagttcagcctgacttcagtgcttaccctacaacctactgtctcccttactgtaagtgtgggtatagaatgtcaggcactcccaaatgtttcaagtcagcattgctatgataatgggagaaattcctgtttgtcataaaacactactagatttcccattgtctgagataaaattgggaaatccataaagacattatctctagcgtcgctgcagcccaggccaagtccaggaattctgtgccactagcctgaggaggcacccagagctgggtcagtcctacccacccccaagggctgctctatttccaggtcctgaccacttcctgtcttgactattacaagaagttaccaaccatgtctggctgaatcctgagatatgatagtggcaccagaaaaacctgggcattgggccaaggtctgagctaaacagagggcccttgggatacagcttttccttgaaaggatgacaaacagagagatgactgtgagctggaagtatgattagcaagcatgtctcacttcccccatggccctatgtgtttccaacccagtaagacctgcctggaagccatgaggcctgaggaagcagccgtgaggcctcacctccttcactgcacaggacccctggcaggagcgctcctctgcctctctggtcctgcctcctccctctcctctccacccctctggctccattctcctcgcttcagggactcagatacctgtgcctaccccaagggctgtgttccccgtccctgggcagttactctcaaccgccatcctctgtctgcctcaccctgattctttggtccttccctaggaactctttgcctgcacaccgatcccttaaatgctcagaggattctgtacatggtaaaactttcagcctaagaccattctagttaatgaatgccctgtttcctaacgctttcctttgctcaggtcataaaatggactcgttgtgcctcagaattctactaggcaatgcactgaataagatttaagctaagaggacaagaatgttgataactttacatctgacatttattgagggctcattttgggccaggtgttattctaataaatgcctcatacatattaccttgtaacatcctcacaacatcccttaatgaggtgggtgttgttttcatccccattttagagagaaggatgccaaggtgcagaaaggaagaggagtctccagttctaaactctggcattctggcttcagaggccaaacactcaatagtcaagccatacccagaagccttcaatgcctacacccccaaaaagtaattaataatggatatttggggcactgtggcaggtgaccatggatacccttcaaggtagggggatagaactcccaaagtccctcaaaatctaattgtaatatggcagaggatgggaaggaagcatgtgaaggtttggctatgatattaattacataggttataagatataagccccagctctgtttatctgtgccaactttttaagttgtattttttcatcaagacagacggggaaaaaagtaccttaaaaatatgagctagccaggcacagtggcatgtgctactcaggaggctaagatgggaggatggcatgaactcagaggttcgaatcctcgcctctaaaattaaaaattaaaaaaaaaaccataaaaatatgagtgattttgtagcaagactatccttactgatggcagcagcgggccatccgaagcaggggcttaccatcacaccagctgcagcagggaggagccagcagtggcgacaggagcagctgtgggagtggcagtggcggcggtgggacccctgcgccccacgtcccatgtgccctgcatcccgaggcagccgactgcaccgccctcaccatcacacggcgtgggtgggacccacccccaggcctggagcctccatcacttttgaccctgcccccatgtcgccactcttgcccaccgcggctgcggggagggtgtggggaggaggatgacagtccccagagcccagcccagggagctgccccagagcccgccgccctgggggccaccgcaatggggccaggcccagtcaccagcctgcaggggaacaatgcagttgggcacagagaggtgtgcagagaggggcctggggcgcagagctggggccgtgcttaggggaccgggggtggaaagcgggagcggcccctgcttagagacccagccagcagtacggccacgtgcccaacccactgagagcaggggttcctgtgcctcaagaggaggctctgcgcagggttgccggggctgcatccccaggatctgccctacatcagggtgaccaccgagcctgacactcctgatggccgggctcaggacctacaatccactctcgaagtcactcctggaggcacccctgggcagggtctgacagggcgggggagagccctgggccatccctgagcattggggccatggtaactcatgacaatgacacccttacaccagatgcctggcccaggcccaggcccagtgaaaacttgaagacctcactccagactgtgaggaggcaccgccagggccgctcgctccacagagccagcaggagccagggactagcagaagccccaccccttccaagttggtgggtgggaactccccaggtgctgctgcagccaccctgccctgtggaatcaggcatttctgcactcttgggagcccaggaaggtccctctaccccctgcaagctcgggggtgcctactcccgctgcctggcttctccccactgttggcacccactctgatctcagagcaaggccagggcctagcctgggcactgtcacagccctgcctgggatgcacacacttgaggcagtgctgacacaccaggcccctgctgccttggtcccctctggactgtgggtgccaacaagcacaggaaggaggctgaggggagtgctgaggacagcccggagctggcctgctgactgaacagcctgggcaccatgaagtggacaggaggcagacaggctcctgggtggaagagggagggtccccagtgaagctccactttcaagggagtggcagggtggggggcagctgccagtccaagaccagagagggaacctgaagtgcttttctctgaaccctgcccatagccacctatggacaaatcagcatgcacttcctcccttatgaagcccataaaaaccctggactcagccagactgagcagaggagggaaagcatgacagccagggaggtgatgaccagctgcagagaggagctgccctccccagaggagctgcccaccccagggtctcctgtctgctgagagctgaggagatgaccagctgcagagaggagctaccctctctgctgagagctgaacacttattgggacaccctggctatggagaggagccgctcactacaggtctcctctgagctgttctgttgctccataaagctcctcttcatcttgctcaccctccacttgtctatgtactcattcttcctggttgcagggcaataacttaggacctgccaaatggcaaggctaaaagagctgtaacacaaacagtgctgaaacatgccgcttgcttgccccattgggggcaaagaggagagaaaatctgtggccctttaggaatctcagacctgggagctccccaagccagggctgtgactccctctttggggccctgcagttcctggcatctccaagcttctgggtgccactgcattccccactgccagccagggaagctatttgtgcacccagtccagcagcagcctcacagagagctggcacccatgttaccacctggagctgcccaccctgtggcagcagccggcatgtccaactgcgcacagtggctagaccccatgctcactcatgcaccccttaccactccatgtctgacttgcagtctcccttgaaggcatgggattcaggccgataatgtgagcggagcatggcctgccaggccgagtgggtggaacaagcccagtaggcctgagcaaaacttgggcaaaggcgctgttggccacagacgtttcccaccagaaaagcaacactccaaagatccaataacactaccaagtccaaataatctgagtcccattcacggaaaaaagaaatttagtaataggtatacctgagttacaaatcacatgacacaagtgacttactgtctctcctgctactccctacccactccatctcttctcccacaacccacaagactcattgcaaccagatgccacaaagaaaggaccaggggacagggtcaccaggacacatcccctcattccaccttcccaactggagccgcaagcagcattcctcatttcctttaatttaaggtctctttggctcttaatccctgggaagtgtccctaactcacctctagtctctgatcatttctgtactctaaatcatttcagtatttctgccctaattttgttaagtgttggtcggatttatttatttatttatttatttatttacctgctagcaggtttgtaccaaggcctgaatgctttgctctacacttctttgagtattcctagtgtcatgttatttggtggccaaaatggtacatgatggctgagtaaccaaagctggagaagaggggagaaaaagagctggaagggatcccagagcacctttgtctcctatactgcaaaaggaaactgaagcccaggaggagaaagtgacttgacaaggtgaaaagtttgactggtggtgagggacaaccaggtagtttttgtttcctacttcacggcattgggtagagaaaattggggtggggccaaggaaagcaaagggcaataaggcatggcgctaagaacacaggcagcgagctgatgtgggcctgattcctgaagcttccacccactcactgagtgccctggtgagagttacttaacctccagaagcctcagttttctcatctgtagaatggggataaccacacctacctcatgaggaatctctgggaagggtaaatgaataatgtacacaaagcacttgaaacagcataagcacaggggaagtatgcagaagagggaggtgctcttactattatgagcagtatttctctctccatttgtcttctaggcattttttattcttctttctttctttcttttttttttttggtcgggtgcaggatctcactctgttgcccaggctggagtgcagaggcacaatcaagtctcactgcaccactgaccttccaggctcaagtgatccccccacctcagccattggagtagcagggaccagagacacacaccaccacattggctttttttttttcttcactttttgtagagatagggtctcactgtgttgcccaggctggtcttgaagtcctgggctcatgtgatcctcccaccctgatctcccaaagtgctgggatatcagatgtgagccaccacacccagccatttctattatttttgagttttctaaaagaataatggttctttcattttccttcttttgctaaggttattcccattgcttaagataccctcctcccctacagagctaatgtgtattgagtccttactatattgcagacactgttttaagtgctttacacattttaaattatttgatcttcttaataaccaaattgggtcagtatgactattatccccagtttatagattaggaaattagccaggcatggtggctcactcctgtaatccaagcaccttgggaggctgaggaaagaggattgcttgaggccaggagtttgagaccagcctgggcaacatagtaagaccccatctctacaaaaagtaaaacaataaaataaaatagccaggcatggtggcacccacctgtagtcccagctccttgggaagctgaagcagaaggatgacttgagcccaggagtttgaggttgaaatgaactatgcacagcaagactctgtctcaaaaaaaaaaaaagtaagttccaattcaaaacaaaaccagcaatacaatgcattaaggacatgattatgaaactaactatacagagttctctccacgttccaactggtaaccaagcttttaatgctggatctttgacttctagcttttgtttgtttgtttgtttgtttgtttgttttgagacacagtctcactctattgcccaggctgtagtgcagtggcatgatctcggcttactgcaacctccacctcccaggtctaagcgattctcctgcctcagcctcccaggtagctgggattacagacatgcgccaccatgcccagttaatttttgtgtttttagtagagatggggtttcaccatgttagccaggctggtctcgaactcctgacctcaagtgatccaccacctgggcttccaaaagtgctaggattacaggcgtgagccactacacccagccaacttctagcttttttcattagactacagagcacagatagactgagctgattactgaagagtgtaggtggaaatggaaagggagaaggtagggccaagggggccattattgaatctcctttgaagctccagggccaggaagttgagaccagctcaggcagatgtgcagtttcaaattcttggccaccaagaccaaagtctcacacatcacaaagaaaactgagacatggatgcccccaattccctgtgcctacatcgatcacatctgtcagttacaaagtgacacttctgtccctaataactaatatcatataagatttatgtaaatgcaaaatgattgagatttttaggaactgctcatactctcttgagtatgaccaaaaatttgtgagaggagaatcacttccattgacaatgaacttaattctacagaaaaattaggccgagtgcagtggctcacacctgtaatcccagcactttgggaggccgaggcgggtggattatctgaggtcaagagtttgagagcagcctggccaatatggtgaaaccccatctctactaaaaacacaaaaattagctgggtgtggtggcaggcacctgtaatcccagctactcaggaggctgaggcactagaatcacttgaacccgagaggcagagtttgcagtgagctgagatcacaccactgcactccagcctgggcagcagagcaagactctatctcaaaaataaaataaaataaagaaaggaagaaaggaaggaattaaactgataggaatggaggcatgtgagtaagtgctgatcatcaggaagattcagatctactgggaacctgaccatctgagggaggacacccagtggaggccatcagaacctgacaaaggaagagaggaaaagaggtggcctcagtggtgtgcaagcctgtgcgccctcagttcctactaggggatatgtgccccttgcagatccagcagggtttggaacaagattgagaggagcttggtgtttatgcagatctaagtggccccacaaaggagtaaaagttataagtggaactgtctctttaaacccaagagtgacccaaagaatggcggggggcagagctggaagtgaagagagtcctgggagaaagagatgagctatcttggagttcatggtagcctgagaggaagactggctacaccagatgcaatgtcaaaacattcaggaaaaagataaacagtatcccacaaaggccctgaaacagcagttcttaacctttttttttttttttttttaggcctctgacccctttgaaaatataacaaaaaggacaaatcctccccttggaaaaacagcagaaatatgcctacaatggttttctatggttaagaacctcagtttctattgtaaaaagaatgaatggtactcaaaattgaaattctaggccgggcatggtggctcatgcctataatcccagcactttaggaggctgaggcaggagaatcacctggggccaggagttcaagcccagcctgggcaacatagcaagaccctatctctaaaaaaaaaatgtttaactagcaaagcatggtggcatatgcctatagtccttgctactcaggaggctgaggcaggaagatggcttgagcccaggagttcgagggtgcagtgaactatggtcatgccactgtactccagcctgggagcagggttccagtcaggaggcacaggggcctccctctttgccaacataaccacagattctaccttttaggatttgggtaaaaagtaaagaagaataaaagaagagtgagaaagagaactggagaatgggatagaggcaaggaaaagggaagaaagacacgatggagcggggagcacccattcactctggagtgatgtgtacccattcagaggtagagaagcaaagtgaaacaatctgaatataggtcaggtgtggtggctcatgcctgtaatctcagcacttttggaggctgagcagggccaatcccttgagccgaggaggtcgagaccagcctaggcaatgtggcaaaaccccatctctacaaaaaatagaaaaattagccaggtatgcctgtagtcccagctacgtgggagactgaggtgggaagatcacctgttcccccccagcaaggctgaggctacagtgagccttgattgtgccacactctgctccagcctgggcaatgaagtgaaaccctgtctcaaaaaaaaaaaaaaaatctgaaggtgagctgggaaagcactcattcttttctcccctaatcttgtacaaccacagaatcataggtttcagggttggaagagatctttagttcaaactcttccataaaagccccatgaaatatttgctagtgttcacttgaatacctaccacgacatgggactcaatacttcgcaaggtagaccattccatttgagaaaacctctaatcgacattaaatttttcctagcagggatctgacatatacatctctgaggttttcatccactgatcctggatttgcccccaaagtgacccagaaaaaatgtaggacaattccccattatagaagttgctgtttccccatttctcagccaagtactttccagcaggtgattgttctaggcaaatactcttgaatccgtattatgtggccatttgctctgaaacctgttttatcttgggtctcagttccctctaagctacgtattttcatgttttagagtcagaagattaatctccttgacagaaaagatggaactgaggtcaaaatagaagttgagttctactaatgtcacactgctggcacaaagggcagtgcccttcctgctcttcttgctctgaacgtaagtaaaagcatatatttgttggttttaacatataaacattttcatttcattttagacttatgccttcttggctttgttctcacagctctatgccactactttatgtccatcagcggctctcagctcaccttcagaattttttttttttttttgtagacagggtttcacttcattgcccaggctggagcacagtgtggcgcaatcacggctcactgcagcctcaaccttcccaggggggaacaggtgatcttcccgcctcagtctcccgtgtagttgggactacagacatgcctgactaatttttctattttttgtagagacggggtttcgccacattgcccaggctggtcttgacctcctgggctcaagggatcagccctgttcagcctccaaaagtgctgggattaggcatgagccaccgcccctgacctatctttagattgtttcactttgcttctctacctctgaacgggtacatgtccctccacagtgaatgggtgctccccgctccaccttgtcttttttcccttttccttgcctcacatcccattctccagttctttttctcactcttcttttattcttctttacttctttttgcccaaattctaaaaggcaggaactgtggttatgtcggcaaagatgaaggcaccctgtgcctccttactggagccccgctccctgagttcttgtctattgatattccatcagagcttgccacctctcctccttaaagccctccctgaccacccctcctcctctgagctcctagtgtcctggtcccacacctctcccttgctccttagacatatactgcctagtgtcatttcgattattttgtcttttaatatagttcagctccacttatatattttttccctcaagtagagtataaactcatagagggagagaccacagatgactttgtttttatatcctgaagtacctactgctgtgcactcaataatttattttgaatgaatgcttcccaccgctggaggttctaaacacacatatacaataaggatcaaaacgaaacaaatggactaaggctgactgtagtgagagggagttgctgaatgctaaatgattagtatcagagagctggaagggacatgaaccatgatctaatcgattccctcattttgcaacctgtggactgaggttgagtggggatgtgacttgaccaggtccccacatgtccacaagtgtcctctctatgacccctcattgcaaaacctttgtgggggtactgaagcaagcgaacgaattgctgtgagtctttaaaagtaaacaaaaactccatttgtctgaaggcaaagagacggactaagtgatttctcaagtttcctttcagcccgggctggcaatcggttttctccagcgtctcaggaacgtgtcaaacgtgggcgtcctgttggaagcacgctgttgcaagtttgtcatctagtggtggaaggtaggtattgcgccaccagccatctccaacaccgttttccctaaaagccctggtcaacggagtttgtttaggatgccaaacgcgtgatgacactctgctaaccgtggccctcaggtgattacagtctactagaagtctgcagggtctcctgtagctctacagttccagtctggcgactgtgttagggagactaaattgtgaccatcactaattaatacagatgggaaaatctctagggaagaggtgagcctgacttgcgtattgaagggtgggaataaggtggatgaacagaatggggcacgtatcaggagagagaaacaagatgaatcaagaggtcctggggtgaggagagaaggggagagggaagcagcactggggagctaacagaaagaaagatcagctggcttcagccagtgatgcctctagcagatttggggcaaataaaggaaggccttagaagttaaatagaaaggtttggaaatgacccagtaggggataggagctcttttaagtcctaattagggaagaaatttgattaaaacagtgtttcaggaatataaatatgccatgctaccatcttttttcttttgtctttttctcaccaccccccaccccccacgaccagccccaccccctagacggagtcttgctctgtcacacaggctggagtgcagtggcgcgatctcagctcactgcaacctccgcctcccaggtttaagcaattctcctgcctcagcctcccaggtagctgggattacaggcatctgccaccgcgcctggctaatctcaccatgtttgccaggctggtctcgaactcctgaccttgtgatccgcctgcctcggcctcccaaaatgctggaattacaagtgtaagccaccgcgcccggacttctttttttttttttttttaagatggagtctcactctgttgtccaggctggagtacagtggtgcgatcttggctcactgcaacctccacctcccgggttcaagtgattctcctgcctcagcctcccgagtagctgggattacaggcatccaacaccacgcccagctaatttttgtatttttagtagaaacagcgtttcaccatgttggccaagctggtcttgaactcctgacctcaggtgatctgtccacatcagcctcccaaagtgctgggattacaggcatgagccactgtgcccagcccatgctaccatctttaactggagaggggaaactagaaaaattatgagtcgagtttgttgttattattcttcctatgtatttttaaattaataattaaattaataaatgtttttaattaataaatacataaactcctaaactgctatgacagaatgatagaagtgcttagcacagtgccagcacatagtaggtgctcagtaagttgatgatgctctttattatcatctctctgaaattcacctttgacatcaggggacctcatatgatcatcatcttagctctagtgaccgctttgctcattttctctccgcggggtagtagaggctctggcctctgtcaggggcctgtggcagtggacagggaggagacttacagaaggcccctgaataccctctccccctctgctcctttcccacctccctcctgaaggtcactggctgttcgttcctctgacagtgggaagtttccatgaagatacccatcctctgataactttctgggcaactttctccccagcatctgtccacagggagcagaaagcctggcctttggggaacacacagtcatactctctttccacagaagcagcttccctgtgtcccctcatgtgtcatcatcccttcaggatggtgccattgctggctccaggccagagccccccttaaatcttcccccgagctgggacacctttcccctcctccttctggcccacttactcacactcatcctgcctgagatgccaccttctcaggccctcagtcaggaacccctcagggtggtggaagggcccccagtgggctcagtcctatttccataaattatggttgacccatgaacaacgtagaggttggaggcaccaacccacgtgcaatcaaaatgtgcatataacttttgattccccaaaaacttaactactaatggcctactgttgactggaagccttacgaaaagcataaaaatttaacatattttgtatctatatattatagactgtattcttataataaagtaagttggagaaaaaaattaagaaaatcataaggaaaagaaaatatatttactagtaagtggaagtggataatcttcaaggccttcatcttccttgtcttcaggttgagtaggctgaggaggaggaagggttggtcttgcggtcctagggtggcagaggtggaagaggaggtggaggtgaaaggagaggcaggagggacaggcacattcagtgtaaattttattgaaaagtgtctgtatataaatggatccacacagttcaagcctatgttgttcaagggtcaactgtacatggtctggatctgggttcgaaatagtggaagtcagtctagttgaagaaaatcgtgaactttatttagtcactttttatgcatacctcttcccaggaggggcaagtgccaaaccttagttatgggccgggcaaagtacagggttggggaagggatgactaggaggacaagagtctcttctgtcttcagataaacaagcccaacaccatggaggcagcaaataagttgcactggttcccaaggaggtttgtgaagtagaaaatgcttcccggctgggcgcggtggctcacacctgtaatcccagcactttgggaggccaaggcaggtggatcacctgaggtcaggagtttgagaccagcctggccaacatggtgaaaccccatctctactaaaaatacaaaaaattagctgggtgtggtggcgcgcacctgtaatctcagctactcgggaggctgaggcaggagaatcgcttgaacctgggaggtggaggttgcagtgagctgagatcgtgccactgcactccagcctggatcacagagtgagactccatttcaaaaaaaagagagagaaaagaaaataaaatgcttcctgaactattctctcagtggaagtgatggctgagccggagcagcatcttagaccatgtgtagaggtcacacactgagacaccatacgataaaagaacttgggtccctgaggactgtggagcatgccggctgtgccagccagggactgccaatctctggattgtaatgggaggaagaaacgcacttccatgtctcttaagccactgtgttttggtgtccatacgcacagccaaatataatcttaattaatactgtgttcaataaatgttggctgatgttgtcacatgattataactaatgtctgtcttcccactagactgaaagctccttgaggacaggggccatgtctgtgtggttcagtatatccccaaggctcatgccagtgccatgtgcacagcaggtacccaatgggcatctgttgaattagtaagtgagctatgacctctgttcatgctcttcttctccctggggctaagcaccaaccttggggcaccttttcctttaaggtctcactgaaagcccttctcccagagaaaatatttgtaatgcctcacttctttctggttcctccttgtattggttccttaaaacttacactgtatgttacatagatggagttatccctatgctatttggggatcattctctatttatccctggatacttatgtgcttgcttaagtggacagtaagctactttgggcaaggaaaacactttcagttttcaaatcactgggaaccttaactccagttcctcacaagtgaatacagtgagcaataaatacttgctgaagaaagaaagaagagagggaggagggtgaggatcaaaaaactacctatcaggtactatgtatattacctgggtggtgaaataatctgtacaccaaacccctgagacatgcaatttacctatgtaacaaacctgcacatgtgcccctgaacctaaaataaatgttaaaaaaccaaaaaaaaaaaaaaaaaaaagaagggaaggaggaaaacctgacgaggccccagtgctaaggagaatgttggcatttcaaactgggggtgtgatttaaagaaaaggagcagaaagtgaggccaaaaagagcagtctgcgaggtagggacaaggaaaagagtcctaagagccaagcttggaaaacatttcaaaggcaggttgaaaatggtgtgttgaaaattgaaacaatgtagaattcaggggaccttgtcaacattagctgtgaccttgattaagtcacttcccatttaaggatctgttttcctgattttgactcttaggaagtctgactaatcggtgaactggctctgctccaaggagcctagttagaggctccaagaagcctgaacccagccctctcctcctcagccagagaaactctgttctcttcagtttcatgcactgacttccccataaaatttagttcgaacaaaaggctatgggtctaaaccaaagtttgagaaccactggattcaatgaacccctgctcaaccgtataaagatccctggttttgtgtttcaaccagtcactcacaaagctgaaacccttcctcaaagaaaatctgggaaacaaagggcatgtatatagaccttggccttgtctccccagccagactgtaaattctaagaaaagcaaacttgggctcatggttctcagcttcccatgacaggcaggcagccttggctgaattcttagatgtttcacagagttctgtggctggatgattgatagttaggcaacagaaaggccatgggaaggatttatttcaccttggggagtcctcagggatgtaaggactccctttctgggatgactggacccctgtgctcccatataaatatttctactcatatacatgtgtgtttaacttcctcacatcatcttgctccttcttcccaattgctggttttcaggcgtctcttttccacgtgcctctccccactctcctcctctctcagcctgaggttcctgacctctgaccctgactctttccagggcactgagctggaatcctgggtctggagtcaatgagatgtccagaacaggcaggactgaaccaggtaccaggagctttgcactcagaggaagaggcacctaaaaaagcgaggaccaaaccaaaccgtggttgacctatacaatgggacatgattccgccttaaaaaaggaacacgaggacattgtgctaagtgaaataagccggtcacaaaagacaaacactgtctgatttcacttatccagggtggtcaaattcatagaaatggaaagtagaatgctgattgccaggggctgggggaaggagggaatggggagttatttattgagtacagtgtttctgctggtggaaatgaaaaggttctggagattcattactgatatggtttggctgtgtccccactcaaatctcatcttgaattcccatgtgttgtgggagggacccagtaggaggtaactttcccatgctgttctcatgatagtgaataagtctcacaagatctgatggtttttaaaaggggaatttccctgcacaagctctctttgcctgccgccatccatgtaagatgtgcctttgctcctccttgccttccgccatgattgtgaggcctccccagccatgtggaactgtaaatccattaaacctctttttcttcccagtttcaggtatgtctttatcagtagcatgaaaagagactaatacagttacacaacaatgtgaatatacctcactctactgacttgtatgcttaaaaatggttaagatggtaaatttcatgttatgtgtattttacaacaatttttgtttaaaagcagcaagagcaaggaccaaaggaggagtccctgcctcagcctggcccctctctgcctgccatctggaggtgtgattaggtagagggtgagcccaaagggaataaaactcctccaggtgacaactcctcaagctgctggccttccagagcttgctctcctgggtctgaccccaatatctctagatccacaggcttttgtccttgtctcctagctcccagatactactcatttctctgagcacacatgaggcctcaggtgactttatctctctctctctcacacacacacacacaacgcaaaccaatgcaattcgttaattagttttaaaaaaacaaacaaaacagagactggtcagaatcccagagcccagcctggccgtgttagagctgtttattaacagggagggcctgtaaggtccttggggcagtggtgtggtgataagtcgaggactccatctcagctcacccagccggggcctctctttaactcaccctggtatggctaaagccaagggccaggcacctgaaagaaagtgctaggaggaaagggcatttcaccctcctagacccagccccttaccacacccagggggatcccagggaaaacctagggaaagaagtgaggaagaacggggtcaagagcacaggccagggaccttctcttccacttgggatcggctttctcactcccaggagcctgtacaggaggccccaggcctgagggaagggcattgccttgagagatcctgggagaggcaagaggatgtgactgatagggtcaagacagggtgaacaggcaagggcaggcaggagacaggagatggtgagtgagcagggctgtcctcacttcctgatcccaagaggtttcctcttaaggggtcagggctgggacagatgccttctagggcacatggtgttattcttaaggccctatgtgaccccggaagggaccaggagggagaggctgcactcacctggaagactctgcttcaccctgacatgatgtgcttgacaaaggctaggaaaaaagtgaaaatcagccaccatgtggctcagcgcctctaggcccataaaccacttgtcccttctctacactgcctgacttctaaccctcctgctcccctttctccagactgtgtagttcctgctcttatttgggggttggtggggagaaggtgggtggagggcagatacctagactctgctctgtgcccactctctatgctgattctcaacacaaatggaatgaactacattatctctatgaatccccacagccttgagaaaggtgccagcatcacccccatccctcagatgagaaaactgaggctcagagaaaatcagtgacttaatcaagcccaccagctaatatatcacagagctatctccaaaatccatgctcccgccattacactaggaggttcactcacaagatggaacagaacaacatccaatggggggtctacaaaaacccacctcagacacataccctccagctcctgggcccaccccacccaagctgttcccatcctaccatccctggctgccctgggatgcaaggcgcggcttaataccttcataattgatgcagccattggcatcctcttgcccagctaacagctgctccacttcagcctcagtcatcttctctcctgcggtgggtttgggaggtggtgcgctcttaattacagatggcaaaggaggaactggcaatacccaagtacccccttaagtgtgaaggtccaagactgcctggatctgggaggtggttcaaaccaagcctctcccagaggttctgaagggtgcggccaagggtctaaaggtcttgcctagtctccgaagcctccccctctgccttacagcttccagagcctcagtgtttcaggcaaagacaaggacagaagccctgagtcccacctctcaggcctcagtagtaagccctgctctgccaacctgctctcccctcctctcccaaaccctggtacctgctgagcaaacccaactgggaatggttgttcttgcagagcccagggagacagggcctggatcaggtcattatcctcaggatgcaaagacccttgtataccaccccccacccaaccagcatatgtcaccttggcacctcccacccctccattcctcccacttggtcttcatctctgcccagctggcatacccagggtggcaaggacgtgccgaagctcagcacccatgaccgtgccattgctctccttgtcaaagacacgcaggccctccacgaagtcctcataggtgccctgctccttgttgcgggaaatgtgctgcaggatgggcaagaacgtctcaaagtccagcatcttgacattcatctcttcaggcaggcagggtaaagaaagagaaatcaatgtgagcaggtgctcaagggagcagagggtcaagagggggcctcaccccaagtctgacagcacccagggcttgggctgcagccaattctgggtggtacacccattagtgctcctagaggacacagagcttcccatccaagcaaggtaggggactgggagctggggagatggtctcaggggccctcttttctcagtgaaagcagtaggatggaaggaaaaaggagccctccacccagacctctaagcaccaggtggccagccaagcggaggagctgagggtggcagcagcaggatgtgaggggtctgaagtgccacgcggcccgggcctcacactcagtttagacccttgacgtgacagacctataatcacaggggcaaaccaacaggattgaaaaaagcaacgtttgcatcactctgcatggggtcccatcactagaccacacagcttgaagctactctgaatcaataattcttataaattcacagttctcttgtgaatagcatacttctcccacatggtagtgtatttaaaaggctttaatttaatagaggcaaactatttttaaatatcacaaatgtgggcatttctttcttttataagcacacaggacttgcttctgacttctgagatgcaagcccctagccctctggtcctttcctgcccacatccttcacccccgcggttaccttcagccagaggagaagggggacgggccagaaccaagggatggggaggaaaccactatggggcccaggaagcctccagagacagaccacccttgctgagaggctcaccccaccccaaaccccgtgccaacaccactgaggagaagcatgtgtgtgtgttttagagcagctgttaacttgactggcacacatgacagacaacattcacaaacaggacacactccctcacacctcttctcatctgccgtaatgattgacagaggcacagctcacatgagtatgaacactcaatgatcacacttaggagccacaaaagaatcgtttgcaccactttctaaacacttactcaccattctaaacactcactcaccaaaacctattgaaatgcaaatgaatgaaagaggcagcacgtagagctaagaatcttgaagctgctctaatttataccaaacaatttgcaaacgtcagtactctaaccattattagaaacaaattgtttgtaatacagctcgcgatggccaccacaggatacctcggtgctgtgacagatgcccctcctgagagctcctgggctggggagtgggaaccatcagttatcagatttccagattcccactcagccttcctcagacactgaggcaacagaatgtggctcatgccccacaggagctcccaacctcgtgagggaaacaagcccaggctacattcctcaagggtcacttaagtacggggacgtctagataaattctcaaaatgggactagggtaagctgggtaggtgaggctggtcctgaggggctaaagcaggagaagagagagtgcagatggcagagaagatctggacaaggaggaagccaaggggctgcaagcctgaccctgggagaggtctgccatgcagccgcactgaccttcaggcttgggcttgcccagcacacgcagcacctcggcattggtagggttctggcccagggcccgcagtacatccccgcactggccgtaggtgatcttcatctctccagtcggggtccggtcaaacaatgaaaaggcctctttgaactctgtggagagaagacccagctataccttccaatccccagtgaaggtggtggctggtggccaatcagcctccacccaagctgaatagcaggtgagtgtggttgttaaaatatcccaatatttcgctttgtccattatcccaggccgtccctcgaacccgtcctcatcccatcttctgtcaaccaaagaagcagcctggtgcctccacgacccattccagggctgggactgggatctcttctattgcttcgttgttataaaattccagtgttgggaggctgcggcccgagaatcgcttgagctcgggaggcagaggttgcagtcagccaagatcgcaccactgcactccagcctgggtgacagagtgaaactccatcttgaaacaaaaaaaaaattcagatgtctccctggcctccacccctcccacccacacatcccgctctggtgtaggtgaggttcctgactcctgaaatgacagacaagtgaaaacagcactggcccagaagtgaggattcctaaattctcatcttggctctgcctcagagtgcaggataagctgggctgggtctcagcttcatgtgcacacaaagggagtgacaactacaccccactccctgggcctgtcactgtgagagcaaagggaggtcgcagtgtgtggaagcactttacaaagtgataagaccgctggaaagtcagctgttatcagtactgcctgttccaggctgaaaggcggcccccaggccagataaggcaatggtcagaccaccccagctctgccatggactcgcatacagccttgggcaaactattaacccctgtgggccctcattttcctagctctaagtggagatacaatgatcacttgagtgggttgcaggtgggatcacaaagcacgccaagcaatgttcagcatatggtaagggaatcgacaaattgtggttacagctgtttcctagttctctttcctacttaccagctcagaaccacagggactggactccttgaaggcagcagggcaagtatccctgcagcaagaccaaaggaaggcactcctggtccctttttcaaagaaccttaactcttcattgatttgttttggttttgtttttgtttttgtttgagacagagtctcgctctgtcacccaggctggagtacagtggtgtgatctcagttcactgcaacctccgcctcccagattcaagcaattcctgtgcctcagcctccgagtagctgggactacaggcgcccaccaccacgacacctggctaatttttgtattttagcagagacagggtttcaccatgttggccaggctggtctcaaattcctggcctcaagtgatccatctgccttggcctccctagtgctgggatgacaggtgtgagccatcatacccgggcccaattcttcattgattgggattcaaccaattcattagtggaggtaatttggcctgggaggggcatttaagttaccttatgctacccacaaagaagtgctttactaagcagatgaacagtataagccaaaaaagaattcatgaactacttaggaaaaaaagccagttttcatcctttccaagtacttctttccttcgaggctgcgtatggattatttacaaatcattccacatatcacagaagattccccagacctttacttccaactctttcttcggctttatatgaatttaaaagacataaaaccacatttctttcacattactgaataatcgagttcaaatttcattcccattgcttgactttggacaaataaatatttaacctctaaaaacctcttctataaatggtacctacatcataggtttctttttagttagttttttgttttttttttttttttgagatggagtttcactcttgttgcccaggctggagtgcaatgtcgcgatttcggctcactgcaacctccgcctcccggttcaagcgattctcctgcctcagcctcctgagtagctaggattacaggcattacaggcatgcgccaccacgccaggctaattatgtatttttagtagagacggggtttctccatgttggtcaggctggtctcgaactcccaacctcaggtgatcagcccacgtcggcctcccaaagtgctgggattacaggtgtgagtcactccacccagctatcataggtttcttaaattacattcaaattaatataataatgtatgtaaatatactaggtatataaatacaataatgtatgtaaaaatttttaacacaatgaccagcacatagtaaatgcataaacaatgctgctagtattatcttattgagtttaatcctaatttggatcacttaaccatgtgatcttggccaaatcatttaactttgctgaactttggtttcctgctttgtaaaaaggaaataacacctacctcatagccttgttataaggatgtaatcttttttttttttggagacaaagtcttgctctgtcacctgggctggagtacagtggcacaatctcagctcactgcaacctccacctcccaggttcaagcaattctcctgcctcagcctctcgagtagctgggattacaggtgcgtgccaccacccccagctaattttttatactcttggtagaggtggggtttcaccacgttggccaggctggtctccaactcatgacctcaagtgatccacctgcctcagcctcccaaagtgctgagattacaggtatgagccaccgcacccaggcaggatttatcttttttacctttaaaacaattagcatggtgtctggcacaaattcagtgcttgataaatacatatttgttagttgaatctgaagtcagactttttgatctcctagttcattcagaagagtgaggtcaagtttaacaaaagaggaagtctcctcaaaagaagatgtaatgatgtgccaggcacagtggctcacgcctgtaatcccagtactttgggaggccaaggcgggcagatcacctgaggttgggagtttgagaccagcctgaccaacatggagaaaccccatctatataaaaaatacaaaattatctgagcgtggtgatgcatgcctgcaatcccagctactcaggaggctgaggcaggagaattgcttgaacccgggaggcggaggttgcggtgagcagagatcacaccattgcactccagcctgggcaacaagcgcaaaactctgtctcaaaaaaaaaaaagaaagaaaaagaaaaaaaagatgtcatgatgcttaataagagggtgaaacctgaagaggaaggtaataagaacaatgacctataatttgagcacttaccatgaaccaggatctgagcaaataattttgcatagaacactttattaatctttatgaaaaaatatatgctataggtattattatcctcatgtaaaagccaatgtagatatgacttatgatcaactattaagcaaaccaaggaaatgatggggaggaaggaggaagagaaggagacctgcttgttataactgctaatgctccaaccaatcacctggcctgctgggaagcctggtatgcacataaaaaaatcaaacactgaagtttaggactacaactagaaaaaaaaaaaaaaaagccagtgtgaacttcaggtattagaggtgatgttcaagggtccagaagagacctttcctcaataatctgcagtagtgtggtcacctgcttactagagcaatgagtccagtggtagtaacccctctctaaaagaatacagaagtctggagagggatgagaagcaagccaagggttagaagctaattcctatgagggggaaaaaaaaaaaaagcacaaaagaaattgggaggccaggcacagtgacttaatgcctataatcccagcactgtgggaggccaaggtgggaggattgcttgaggccaggagttggagtccagtctgggcaaaatagcgagacccccatctctacaaaacataaaaacaatggtacatgcctgtagtacaagctactcaggagactgaggtgaaaggattgcttaaaaccaggaattc

SEQ ID NO: 38 - DNA, 158091 bp, Homo sapiens
gaattcatgtcattgttgaatgattgagtttcaatgtgtccttatttcatttttgtcttcttcattaatgtaaataaacctgtcagccaacctacacttgtcatttgccaccataggttgactagtgagacaagggtccaacaaacatcagcaaaagtattctgtgaaaatcaattgctatttggagtttacaataaagaatactgtatatttcattattatttataaattgtataataccttgatagcaatgaaatgcacaatatatgcatgtatgcgtgtatatatatatgaatatattttcttccagagagccagttgctgagtatccaccaatgcaccactgcctgaggggtgtctacataaaaagagacctaacagcccagagcagcacttgttaaggacccaaggcatggtccagaccccaaggaagggaagggggtcagggatggatagacaatctggaaagttctccaaggtggtctgagaaggcttcatgggggacagagagccgtaaagcatggtaggactcaatgacaaatgaagaatggctgtacttcagacaggcacacagcatgagcgcaggaggcgaggctgaagtcagggacaccgagacaagagggtgagcatagggaagcagaagggaatgaagtggggtcaaatatatgtaatggcatggaaacatgctatgagatcaagccaaaagaaaagaaaaagtagaatgcaaaattttacatttgcattaaggaaaaaacacgttagaagaaaatgcacttaaataaattgctctgtgtgatagtatgatagctgattatgtatttatcctcaatgctttctgtaccttcctgttgttctgaagttgtattactttgatattcatggggaaaaataagcttttccagtatgaagggcaaaaagcactgagccaaacctgaagccatagctaaggacagggcacatctcccctgatgcagcccagaggcccctggagggaggtgctggggggtgaatagagactaggggtgtcactccctcctaggaggactgcaggagcacatgggtagccaatgctaaggcctcctgcccccatgggcctaagtagccctgtccacactggggatctgcccgctacctcatagcctcaggtagatgtctggtctctctttgcaaatgtcccccgcaacccatcacattcataaaggcaacaaattggggaaaacgagaggtcctctgtctttttagggcttcaccactgctgttttcccaactaaagaaatatgtacatatgtttaagtatactttaccatgcgtagaatgggaaaaacagaagttattctagagaacatctcgctcaactcgtttattttactaataagaaaatagaaactatggaggtcaagtggcatacccagggaaacagagctaagtgagaactaggctccagcagagatgatgcccagggccgggcacctcctttgtcagcatgcaggtatcatcagacaaggccaaaacagcactgggcgatgtgggctgagcagcccttggcttcgaaaacatgatttttttattattttttgagacggagtttcactcttgttgcccagaatggagtgcaaaggtgcgatcttggctcaccacaacctccacctcccgggttcaagcatttctcctgtctcagcctcctgagtagctgggattacaggcaggcaccaccacgcctggctaatttttgtatttttagcagagacagggtttctccactttggtcatgctggtctcaaactcccgacctcaggtgatctgcccgcttcagcctcccaaagtgctgggattacaggcgtgagccaccgcgcccggcagacatgacgtattctaagcactcctcaaatttacctgtggacagcaagaaggcctacaaggcaccccgtttacgatatgccacttggctccttcagggcagagctgcagcagcagtccttgtttctctgtgccccacatcccctcagcatgtaagaccacttctgccccacccattgctgaatgggaccttcagatgctatcttctccataaagctttctatgactcaggccgcatcattttgtggtcaactactttcactattattgtgtttattctccctaaaccagccaagcaatcccatttggtaatcgaaagagcaagtagcactggcttggtcatttccttcacataaacctgactgaactggatatatggtaaggatttccatcttgtacataaacacttgtccacctccgtgattcacacaattccttttccactctatcccgggcccatgtctccatcctgcccctgatgctggctctgcaggcattttctacatggctgtctgtgtacatgccgtgtggttagtcttaaatcaagggctcctagagtgcataggacataccagtttatactttttctcatcaggaatatgtgtagctggaggattaagaaatacattttcatgagctagacaataacaaaaattaaatggcaaaagtccttgctgtccttagtagctagggagctttaaaaataaatacataagcacctgtttccgtttttttactcctacagaagcagggaaattgctggagaaaaaaaaaaaatgtaagtccatatattctgtactgtgtcccttggaagaataaaattttaaatgaggtcatcaggaagtgcttcctaaatgtgaagttcacagactgaactttgaagtttagcaatggacttcccctgagcaaggtcggcttatgctattgttagaccagcagctgagcctcccccaccacgtccttctacctcttgcaattaaagcacagcccaggcaggtttttcttaaacaggatttttctttatgttggtgcatatgctgctgttataatagcagggacattgtcctcattcccagctctttcctccaagtcaaaacatttagaatgacaccacccaaagaataagtcttacttgaggctttgcaacctctaacccttcccacctctaaccttttcccatctttatccccgttatcttgggtgctttcagttttcagagaccagctttccaacagggctaaataacactctatggtttctttccccatcagaaaccaaagaactccctgtttctcagcccttgccagcagaatctggtcacccctctgcccctcaaaattacacatcttatacaactagctcctgtccctgcaccattcctgtcccttgtccttgatcctggtttcccagtggaacaggaaaaaggttttacagagggttttttgccaccatctctttgttcctcaggagatgattaagttgtgcgttaagtggggaaaaagtacattaggtcaaccccaaaatctgccatcgataacatcagagtatgtccatggctttattagttttctagtgaatatttaagagaaaaaggtgctaggtcatagaacattgagaaggctatacatctccccttggctataggtgcaatacattccaagagggagagatggtagtcatgcctcctatttttttaggtgaggtatgtattttgtagttctgctgggacaaaaacagctttcagtcattgaaaaccaaaggcccagtggacatcaggaggagatggcctccctcactgcaagacgacctctgggtcaaagcctagtgaaactttggcttttcccagcaagcaggaagtgacatagacagtgtctttttagagacctcactttggagaatgctcagtgaggggcaaacatttgctggtgacattgtagttctgtcctttgctaagcttgagtgaaaatcttttggagaatcgacttttttctttcttttttttttttgatgtcccttagagagctcacaataaataaataaatcaaaacaaagctaaaagttcataaaaaagtctcaggcatggtccagattttcaggaaaccagcagtttctggaggaagtcccacccgctcctgaaaacagaaaaaataaacgagagagagtccaccagcaaacaggtgtttagtcttctctggagtcatattaagcaatttttacatttatggaaaagcaaacactccccccacatagggtgtggcccacactgggattgaaaatcagcctcgtgctctgcaccgtgttctggtggcttctgcagctgtcacaggaaggaatccacacccgtccccaaggacgcctgcacgggaacagatgcccgctcccttaccccttgggggaaggacagaggtatctgagggattcagccctgggcactcctctcagcttcctccttcacaggcggggccctgggaggccctgagtggggccactgcgttgctatgagatcagaacggtagccagttggtgggtgcagcaggctcacacctagcaagaacctacctctccctttttcctaagaagggaaaacaactctcaaggctcaccctggaggcccaaagggaaggctgtatgggtcccgtactgcagcttccaagcccacggtggttacgtctgagcaccctgtagggctctgctctgaaagtcttttcagctcccaatgagcattgttcaagccgatgaacatccccaaaacccttccactctcagggcctcggccccacccaccacctggcatctgtctttaaggatgtttataacagagttctgaaataaagttttggctttttcctggagttctaactctgcaggagaagcagtgaggtaggactttgaggaattcaggaagtggagaacagctcatggtgagaggaaaggctggggccgacttgggatgtggatgtgcaaaaggaaaggtgaaggctggatgggaggcagggtgggcacagttaaggtgggccctgggccaggatggcctcccaaccagagagtagccttcaacatctcagcctcgtactgcgtgccagacactctaccaagccctccacttaggtaataatcacgtcttccaccctcactctcaccctgtaagggagctcttagaataacgctgctctccacggctgggaaacccaggctctgatgggtgacatcacttgttcaaggtcactcagccagtaagggccaggctgggctgcaaactcaatggcccactgcagagctcacacaggtccatttcctactcgccatgatgttttccagggagagtttagagaagctctggagctgggaaaagagggcagctgttagagaacagccagcgagaatgggaagtcaggagacccagagctcaggaacagacttccttggcaggtggcgtagtcccatggcctctttagctctcagttttctcatctgcaagaggacaatgggccagattggtgcttctctgagagaaagtaccagtggttttgaccaagggactgacccgaacatggcatgtaagaggggtttgtttggggttggtccacaggatggttacagaggaaggaagaaagccaccaaggccaatttgaagatgtgcagaaacccagaagtgaggtgaggacggcagttctcaagtgcagagcttgaagtggtcactgctgggagggagacgtcataacaagacccaggaaacacttcaaaggaaaaactaacagcatttaaagattggctgcaatagtaacaataaaaaaagctaacatttactgaaggctataccagttatcccaccaagtgctcaactaccaatcctcacagcagccagctgcaggaattatcattgctcccactttatagataaggaaactgaagtttatagaggcagagaaacttgcccaaagtcacaaagctggcaactcccagagccaggatttgaacacagtctcagtacagagcctatggtttctttgtttttgagacaaagtctcactctgtcaccaaggctggagtgcagtggctcgatcttggctcactgcaacaattgcttggctccctggttcaagcgattctcctgcctcagcctcccgattagctgggattactggtgtgcaccaccatgccaggctaatttttgatttttttttttttttagtagatatggagtttcaccacattggccaggctggtctcgaactcctgacctcaagtgatctgcctgccttggcctcccagaatgctgggattacaggggtgagccactgggccccgccacctatgttcttaatccccgtgcaactctgcctcctatctatgtgccgaagaaaggaacaacactcccctccagacctctgcctttcacacccattggccttggatgcccttgtctccccccggttccgattcccttcaaattccagctcctttaaactttcacaccttactctgtccacccctccacacctgcctcgtgctgtccccccgcccccacatcccactccacccccacagttcaaacctgctcatggaagtcctggaatgtgttttctccctcatcctcagtcccacccatcacacagcctgcactggatcatccaagttacatgccaaatgtctgtacccctctgtgtccaagtgaggcccaccttcctctttgcttctgtcatctattttcctgtttcttgcatgcattgcactgtgttcattatgtctattgttgactgcttgttcatatttccaccttccctataggatcgtgagtgctttgaaggcagagagaggctgggccttagtacagtctgtttgcagcacatggcatatagtggatgctggagaaatgttgatgactgaattgacatgattgattgattggatcaaatgaatgaacacaagaataaatgaacatcgggatccaggaaaggggtccttctggcaccaaccctattctgtccccctaaacagtattacatttagtgtttatgataaaggctttcagcacctttttgaagagttggtaccactggtccactttctgccctgcccttaatccatccaattggtttagatactcacacatacattctttctttctctctccttcccttactggaccccagaccaaagccaaagaaataaatgtcccctctcctgctctgtttccacttagataaattaatcctcagcatgagaggaaccaaagccagcaccttagaagtcaggctcctgtcagctcggtttgctcacctgcacacagcccttgacttcctcctcctgtgtgggaggagcacagccctgactcagaggccactccaggcaatcctctcctcccaggcaatcctataaggaacccactggctgagctctggcctctcggcagagggggcaggcctgaagaaccctttccaagaccagctgagctctgctggtccgctgggccctgcctgcagagttattggcggagttattcttggtgctcattagcactgcacaggctgtggattattcctttattgctaagtggcccccagaacactgcagactcatccctccttttgaagtccttgtaaaagactccaagaagtcgattccaatctcttctctcccagcgtggactgcccctggagcagcactgggggtgtgtggctgttagagtggcagccaagggccagctccccagtgaaaggtgatattgtgcttctaccgcacacctgcacgttgggatggtgtttgccttccggcctgactgctctgttctcatcttccatggacatggaggtgggaggggaacttatgtgtcattcactccagggtcctgatggccacttgcgtagagcaaagaatgttggtagggcctgcagtctaggttctagcttcagtgagctctggggcctcgggaaaagggcttgatccctcagaacatctgcaggagtctgtgacccagaccacaccaagctttcagaaactgctctgctcttttactctcccactcctctccaccctctcaagctgtgctatatccacaatgcaccagcccaggctgactcaacttcccgcccactgctcccctttaagctacagcacccaccattttgccccaaactcgtctatcctacctgagctcctgcagccagactgggtcacccatgcccctcctctaaccaggaaagaaaggaaagaatccatcaggtcttttctgtgtcctgagattgcgcaggtattcacccgctccactcccatctccttgacctctttcttgccctgtttctcggcgacctaggcattgggtcctggtcagttttccacttttccatcactcccttaggacccctcaacctctctgctcatcaaaaaagtccaataaaggcattcatctctttgaatacttaattttacagtacctcttgcataactttcaagtttgaggtcaatacaaataaaatcatttaaaatgtctgatattaaacacttctgacccgaaaagcaaaaagccttttaacagatagttacattgatacaagagtccacaatgacaggtttcaaagatgaaagtaatggatcagtaaatagaacagtagagaaaacacagatgaaaggcaaataaccccacctgaaaaatccaaagctttcattttttttgaaaaaaaaattgtcaaaagcactgtattattttttaaaatcatgataaaaggagcatgcacctgtcaccctcccaaccccctctatacttgcccctttctatctttaagtgctgtggtctttgtggtgactttattggctcaagtttcctaggctggtactctcagagcctggtttcctaggagcagtactcataacgcaggtgcgatggacacctgtaggtgggtagtgccgcctgtgtgaaccaactcggctccaaagagcctaactccctatctgcatggttaatccaatcaaagcccaacctgctttcccacacaacagagttcaacagagcttttcattaaagcaacacatcatagcaaatacttaactagtacaaataaagcattttatttaaagcaaggtttaaagacatataaacattaagcatcagagctccattctttagttgctattcatcacagcttatgccagtccttgaattctgtctaacttgggtagtagccaattttctaactcaccttcaacttcttgggatgagtccttcccgggctccttgtttttctagaaatttcagtggcttgaccacacatcaaaacacacagggtggccaggcatggtggctcacacctgtaatcccagcactttgggaagccaaggcgggcagatcatctgaggtcaggggttcaaaactagcttgggcaacatggtgaaactcggtctgtactaaaaatacaaaagttagctgggtgtggtggtgtgcacctgtagtcccagctactcaggagactgaggcagaaaaatcgcttgaacctgggaggtggaggttgcagtgagccaagactgtgccactgtactccagcctgggcaacagagtgagactctgtctcaaaaatggggagcgaggggggagcccaccacacaacaaaacatatagggcttctcatctaaagtccgaataaaagaataatactatggctggtttgcactggaggaaagaaaagccctatcactgctaccttacttttctgatgttttgggttcctatgtcttatcccctcaggaaccaggggaaaaagaagattctgtgtcaagtgcaccctacatctgtccatgtcaccccccttcttccaatcagaacaactcatttcccccacttgactgctcccctaatctttgcaccttggagcaggatgtgtttattgattgatggatatttacttataattggtacctcttatgaaagccaacagtttttacatctggcttttaacacagactgtgctcttcaatagtcttagtgtagactgaaggtttttcaaattcacatttttagaaaagagttccattaaattccacatgaacaacagaaaaaaatttaaatgggacattacagtgatcaattatagattgtaggacatgactgacatgtagggctgggctgggaggaagagacaaagaccaaatgctcaaccaagggcagaggtgaggtgtagattacgggtcagaaccgtaacataacggatggagtcccaagtgaatccaggaagttggaggaagcaggtaagtacttgggttaggcattcacaggcctaggaagtcagctggggcaggaaggctcagacaaggcaaggggaccaggaagcttggacccgtcctgggaagatagagtccaagagggcagtcatcaccggtcccacactaaaagcatcaaagctctctaatcttctgtcttctctactctctctggtgtgttgtcaaggaaggaataggtacgtgggaaactagggagacaatcatagccctcgatgtctaccgtttctaattaatacagggcagaggaattagatcttttggtagagatctaaaattcctctgaagttctatcaagccccatctcctgatgattcagtgctagttctaaaataggaaaacttacttccaaaaccaacagatgtttgggctgtcatcattatgcctgtactaaactcacttgtgatttcactgtgaagtcctgtctgtgtaatttattaggaatcatttatgtaagattatgtagaaaatgttactagtcgtgagatatctatccatctcaatgatttgacttttacagcaatgcgatgggacgtgctgagggaccatttggtcaactttccacctaatggtggtgtgattagaactcctagcgggtgactcatagagagtgattagaagtaaaaaggttctggaaattcccccacactctttaaggcagcctttgtcaggtgtcttagtttcgtgaaaggtagactgatgttttccatctggtatacaaaacattttctaagtagttatagaaccttgaacaagccacttagctctctgggcctgagttttctcatcttataaaattaaatccatcaatagatcacatgatctctatggcttctttattctaaggatgtatggtaattttaaacacttggttagccatcttgaccaaactagcatcacaggtaagaaacaagctgcgaagaccaaaattcttctctggtttatacactctgggtcagaggcaaccactttctatgttgtttgggctacttttccctaaacacataatggctttgtctgcatcaaaggtcatcttctattttcctgcccattcatatgaccccataagaccttccagcatctcagtcagctgagcattttacctcctgcaaagcacatggtttccttcttctctttgcaggtcatatgaaatgctcacacagtacttactgtaatcacttcgtaaagttgattttcacatatcttcatccagaaaattatcccaactgttatatataactttattctaattgaataattccagttttcaagacacttttcagacacccattgtcttgtctgaatcctcatgacaacctcatttttttatagattatacagcattcctacttatatataatagttataactttttattcctaataaactttggcatgacgtttcatcagattctgatagtttcttttgtttttcattcattgcattcccatccaaatgtttactgaccctgggaaataaatccagtagaccaatgaagcatgaatccaactcacagagggtggttagaactaaaagctgaaatggacttccgtgatcacctgacccactcatccctgaccgtaggctcttgttcacagcggccaaaacgtgcatgtctctcaggggcttcctgcttgtggagcagaacctttgcttgcgggctccttgtgtctgtgagctcctcagaaccgctcttgagctcacagtgcctgatttgcacgtattggtttccgctccgttgcttattctggtcccctcatagaagcaatgttatcctttcttcaaacccgtcctttcccagagagctttgcagccacttttaccgggtttaatgagtcagctgcagagtttatgatccggtactaggccttctgggaagcagctttcctgggcttacgtcaggctgttaaagaccctcctggccttcctgccgacatttgctcggctactttttcctcctaattaatgcctctatcttatcagagtggcccattctcaaatgcagtaaatgagtccttgatgttctatgttttattttggaaacttcccactctgctcatatctgaattggtatttgctcactgttgcgcagtggtttgcctaccaggtatcccttacatcaaatcctgtccgccgcttagaaaaaccacagctaaaagttgtttggcaactcttggtgttcacagggttttcccactgagggtcagggactgcacagcggttgagagcttggactccggggtcagctggaactgcttctaacacaaggaccgctcttaacaaagaactgaggcttcctaaacttcagtttctgggtctgtaaaataataggacccacttcctataaatgttgagaagattaatgggaatgatgcatgtaaaatgctcggtacatgataaaagcccagtgattactcattatcccactcaatgcttggggaaaggcaaagcagctaatattaccccagattatagataagaatactgggttcaaaagagatcacttggcttacccttgtctatactgcacctgcatgaatcatggacctgaacccaggtcacggccacctcccagacccttgctctctctgcttccccagcagcgcctctcagagtgaacacctatgtccatgacagtgattcccaaagtgttgtccccaaaccagcagcatcagcatcacctgggaacttgttagacatgttagggtctcaccccagacctaatgaatcagaaactctgagaatgagggcccacaatctgggttttagcaagatctccagaagattctgatgcacacccgtttgagaaccaaagctccatggaatactaatttgcctttggatctagccctgccgcccactcgagatggatggtccacaaatctcaatgtgattcctaacatgagttaagctgtccaaccctgtgacgttatcaggggatttgtgattaatacatagtgacaccatttaactgtggcagaggttcttacccttggaagctcattagaatcatctagggaacttataacagaaaggcccaccccagaccagttcagatctaaagacagcctggactgacaaccacagaactacagagctgccacccagactccatggaactctgctaggctggtaatatttttaattcattaagggtttatgtgtttaacaacccaggtccagtaaattggctcctttcctccctatgaaccttggacactctggctggtcaagcctccacctcatgcccacttgtttgcacagctactaacgtttatgaagtatttgcttaatgtacctaagctccactgcccagagctatcccacttgatctgaaaacgtcatgatgaggtatggtaagcattaaacattagttcaccatagttctatttttttctaataacttaaacggcttcagggaacattttgtgtgtgtgtgtgtgtgtgtgtgtgtgtgtgtgtgtgtgtacgccttaagagactggatctcactctgttgcccaggctggagtgcagtggcatgatcgtagtttactctaacattgaactcctggcccaagtaatcctcctgcctcagcctcccaaagcactgggatcacaggcatgaaccaccatacccaccctaaggaatatagttttttgagcatgttggagtactcagaactctcagctcagctcttggcccacttgggtctcaaccatttagagtactgattaccaaaggaagagcacaaaggaagaaaatcagcttttctcctcttcctcagtgtgggagaggggatttggcttgggctcaaagccatagtgatgctttctgctccaccccctttcaattaaagatcaccagcttcccaaaaacaggccaccctcattttccaacctggctcaggcagggaagctgagaagcttggggctgcccattcacccagtcaccaggcagatagacaggtaagagaactgggaccttcaggcctgccctcgggaggactggccaccaggctttacagcccagagcagagaaacactgtggccgttgcaaaactccttgagtgaagtgaccctaccctctactaaaaacgtggcccagtggattccagttactaacaaagctcgttgagaagatgcaagaaaggaatggaacaatggctaggacctccccgcggcagcacttcccccaagagaatagaggagctgatgggcacgtcacatttttctcaatgctggatgacattccatcaccttcctcatcttcatggaatttttttttttttttttgagacaaggtctccctttatcacccaaactggagtgcagtggtgcaatcatgcctcactgcagtcttgacctcccaggctcaagggatcttcccacctcagactcctgagtagctgggactacgggtacataccaccacacccggataatttttgtaattttttagagataaggtttcaccacattgcccaagctggtctcaaattcatggcctcaaacagtgcttcgggttcagcctcccaaagtgctgagattacaggcatgagtcaccgcacccagctggaatgcattctttgaattttaaaagactgtaaatgagagatttgttcagagaagagggtgtttcctatgtacaaaaccaaagaccagcttttattttttattaggtattatagtcacaaaggtatgaaagggtatatagtaataagtctaagaaatttttatgaagtttttgaagtaaaaagcatttttataaaattttaaataaaaattttaataaaattactcaattgttaaatgtaacttaaaattactttttcataaaattactcattttataaaacacatttttcctactttgaaaagtagtacatgcttaatacagaattggaaaagacaaaaatacagaaagaattgcatttaactccttttttttttttttttggtagagacgaaatctcgctctgtcacccaggctggagttctgtggcgagatctcggctcaccgcaacctccgcctcccgggtgcacaccattctgctgcctcagcctccccagtagctgggactacaggtgccagccaccacacacagctaatttttatatttttagtagacatgggatttcactctattagcagccaggatggtcttgatctcctgacctcgtgatccgcccaagtcaaaacttcagattttgccaaacaccttgaaagtatgagtagatagaggaagactcgtccttttgtctgcctccttttcatcttcctaatacctaacacctctctaatctttctagaaatgggtaagaaaagcttccataaagaaaggtggagagaattgaagcatggtagtatttttgcaggagaaattataaggtttgaaatttatggaggcctcaggacatacccaatgacctaaggtctaggccagagatggtaagtaggattttttttttcttttctcttttttttttttttttttttgagatgcggtctcactctgtcacccaggctggaatacagtggtgtcatctcggttcactgcaacctctacctcccagattcaagcgattctcctacctcagcctcccgagtagctgggattacaggcactcgccaccatgcctagctaattttttttgtatttttagtagagatgggggggggtggtctcaccatgttggccaagctggtctcgaactcttgacctcaaatgatccaccagccttggcctcccaaagtgctggggttacaggtgtgagccatcacacccagctgataagtagctttaaacacaagtgaggattctattccatcaggaatggctgctttatgcagaagaactctaagattacatcaggctaagggtgacagaatgctgtaatccattagccttatctgtcatggtcatggcagcagcaagaggcagtctgagtgccatacactgcagtaatctaggggtgagctgaatagtgaatggagatttgcctaaaagaaacttctggagtcagtgctccaaaactctgaatcaaccaaatgaatgaattgagccaaatagaaatgcatgactattcaatatttattatgtagagaggcttagaaagggcaggcacctggagttcctccaccctcctcacccaatcacaactgcccttactgccctaccagtccagccacgtgccctttcccacccctctcaatgacccttgggctccccagtgaagctccctgagggcaggggacatagctctttggggccataaaggcattagctcacccttctcagccccttacacatttactgggtacttagatcaggccaagtgtggtggctcatgcctgtaatcccagcactttgggaggccaaggtgggtggatcacctgaggtcaggagttcaagaccagcctgatcaacatcgtgaaaccccatctctacgaaaaatacaaaaaattagccaggcatggtggcacgtgcctgtaatcccagctactcgggaggctgaagcaggacaatcacttgaacctgggaggcagaggttgcaatgagcaaagattgcaccattgcactccaccctgggcaacagagtgacatttggtctcaaaaaaaaaaaaaaaaaaaaaaagaaatcttagcaggattacatctgtaaccccggcactttgggaggccgagggaggtgaatcacatgaggccaggtgttcaagaccagcctgaccaacatggtgaaaccctgtctctaccaaaacatacaaaagttagccaagtgtggtagcatgcgcctgtaatcccaactactcaggaagctgaggcatgcgaatcacttgatcctgggagatggaggttgcagtgagccaagatcctgtcactgcactccagcctgggcaagagagtgagactcttgtctcaaaaaaaaaaaaaaaaaatcttgccccttccctcaaggggctcacagcctgtgggagagggaaaatagatataattatatttaaagaattataaaacaaattgtataaatttaaaattataattaaatcattgtaataatttagatcagaaaaaataaaggcaagtaagtgccaggcatggggctaagcattgtactcacccactgtattccatgttgtcttcacaacggccttatgaggtttgctagtattgcccccattttaccaagaaactgaggcttagagcattcaagctagccaagggctaagccatgactcaaacccaggtgtgtctgactacggctgttactaagaggggaagggaatcatctgaacttgggtttcactcagaaaggggcatggttttgttaactttgaaaacactaccaccctaccctctagcactggcagaggggagctggacgcctggacagctggggagggggaggacggcagccagaagcaacagcctctgcagtcccagcagctgggacctcatgcctcaaccaaggatcagcactgggtattggctcagagtagtgaaggctgctgggggcctgtgtttcctgcatttcctatgtttatgctgccagggtgggttttatgtgaccagagagaagcagggaaaattgctgagaagtcagagatctgccagggaatcagtgatgagccccaggaaatgctttttgtctaaaaatatgccatttccgaaaggaaaacagtcattagagggtgtgagaagccctcgtggtgaggaaagcaaaactgtaagactcaatgggaggccagtggaacaacagagaagcccattacccacccacttcctgtgcgattaacaagacgtttggaggatgaaaggcaagcagacaaaatgacaacccacagacacaactccaggggaaatgtctggggacagcataggaagacgcagcagggaggtaggaggagaaaaaactgctccagttaatatctttctggcatcggctggttcagctatagatttggctaaaattacctgtgtacttactagacgccaggcagttagggggctttgcttaaatcactctcctgcattcttcacacagcacttgatgaaggaggaaagtgagtcttggaggttaagtgacttgtccaaggttacacagctgggaagggagaaagacatggctccatcccaggttccctgatcccaaatctccccctcattgcaatgtaccaagctgcctccaataagatcaagagtcttgacgatccccaagctagtccactcagtccagttttcctgccagactatagctgttttgcattccttatcttgtgttgaagcaaaccaggtaaggaaactccccaccttttttattaatgactcattttcagccaaaacacattgcagccacatcaggtacatgtgcccactcagcaaagacgtactgtgagaaagtaacatctaagttacttggtccaaagcccttctacatcaatcatcaagcaaccaaccctcctttgctgaaatctccaggggactaggccctttggtgggggaagaggggacggtttcttcaggggcatctcacccctgggaagtgcatcctctctgctgggggcagtaaaaaggctttacgtgggccactgtggctcatgcctgtaatcccaacactttgggggcccaagcagggtgattcacttgagcccagaagtttgagaccagccgggcaatataaagagaccccatctccacaaaaaaatacaaaatttagctgggcttgatggtcccacctgtggtcccacttacttacttgggaggctgaggcaagaggatcagaaggtcaaggctgcagtgagccatgattgcaccactgcactcaaacctaggcaacagagctagaccctgtctcaggaaaaaaaaaaaaaaaaaaagaggcttttcacgaatttcacattccaccctccaccatctttgatgtaggtaatttatcagcattttgtagaggaggaaacaaggtctcccctacgttgagcccaaatcagtttgaccttggggaacacagtgagcatccctgcgtggaggtacgcaggatccctgagggtgacaaccttcgaggtcgttccctggcctctctgcccagggtgagcatcctcagagacctcagctctcctctcagcatgcaattctcctccactcatggccctcccagctgcccctggcttctcaaagctactcctgcatggaggcaagtacaactagccaatgagcctcctgacctgccccatcccagagagcaactgctgctaggtcctcgtggattctgggcctctgtccagtgaccaaaggagaggacacatctccagctaccatccctccacctattttctaaggaaaccaatgagttctcaaatgccacctgtggtggccccttctcagccctcaccctgagaggccttccccaagtcagaatttcccacaggggaagttactgtgggcttctctctccttcccccacctcatgtggtcaggaagtccagctggctttttctcctgtctgtctctcaaatgtgtcccctggctcccctccattgccactgccctcttcagtgtctggcctgtgctcccacaacaacaggcttgaagctggctgccctctcccctccatcttccacaccataatccaggtgatccttctaagaggcaaaggtaatcatgtttcttccctgctcaagatctgtcaaaagattctgtggcctccatagaaaaggcagacagcccggccacccaggcccttcaccatctgcctcttgaccatctccagtgtcctgcagtgtcctgaatataccttttccctgcctctgcccaacacactcccgttctttcaacacccaactcaactattaccttctctccatcagatcttccctgaaccaccccccagaaacaaaggtgactgtcccctctggttccccacagccaccccaccacttacccctgtgctcaggcactcctggagcactgcattgcaaccattggctcacacatctgtctctaccagcaaaccactaaaccgtgaataagtggcttcctgagccaggccttgtgcaatgaatggatttgcaacaaagggagccactgagagattacatgagccaagtcatggcaattagtccccatggaagcagcagctcagggcagggtccagacttgggcagacttaactatgcaggacattccattaacaataagcaccactctgagcatttcctatgtgccaggaactacgtgaagctctagattctgtcattagaaaggactgagttaattaatggaaagcaggtagcacagtgcctgacacagtataagcactgaacacacgttagcaagaaaagtgacagatcatttacgggatggttcttacaccaggcagcgtgccaagcacagtccatacattgtctcactcttcatgacaaccttaggaagagagcagtcctgtttgtccccattttacagaaaaagatactgagtcttggctaggctaagcgatctgctcaaagtcttcagctcggaagtagtggatttggtcttccatccccagtccatctgctctggcacccaggttctcagagtctctggtacagcagggtgccaaagtccagttgagaagaaagcaggccaggtttttcaggcacagcctgatgaaatatccaggggaaacacatgggactagcaggcttctttttctgtcccatttagtctaatatcacatttaacacaccatcctctaagggacagaagtcacaggaagccatgcagtctggttcctcctgatttctcctgtgtgccacatagttatgcttccttctgggaaggtgtgagttggagtcagtcccctcctgcatgcagctggggaaactgaagccaacaccattttagttactcacatggagctaagacaatcatacaaaactcaggcatggggtcagcccaccagcagtgtggacctcaccctgccggctgcgttccaaatgacagtggcatggtgccacagaaaaaacgtgaggtgtgcagctggacccccagaagccctgactctgccaggtgctagctctgggacatcttgggcaagccatttggcccgagtctttttccccacctatgaaacaagccagagagctcattcctcacaaggctgtggtcagaatgtgcctctgtacttgagaagctgtaaaatgttcctcagttgctgcccttagtagggagctcagaggaaagctagttttgcctgtgcgtttctgtcggattgccctgtacccagggcacgtcctgctctctgacaacaatcagggtcattctaactcaaatcaaacaacctggtctcagaactggtcttgcaccaccatggtgttaagctgccttcccacttcatccatgtttgctaagccgggtgggatctttcccctacaaactcctataggcggccacatttttcttttaaagatattttcccttcgactatagtccacaggcatcagaggatgaagctagcaggttgtctgtatgtagactttcttccagggaggaaagcagctttgctatctcctacctttttaaacaaaatctgccttgattttgtctgccaagatatgtctttggatggggtaaagcacttctgagggaagctacgtgagccacgttgtagctggagagagaattgaaagaggaagccgagctgagaccaccacagttccggggctggagcccagctttgcagaatgcctgcatagcagtttgaccccaacagatgaggctgttagggacagaaatgaaaagcactgagagaggggaagtgtgggtggagcttatggacattctatgagccaaagcaattttgaagtctaatcatttggagggaaaatatttgtcatgtcattttaaagggtacaaaacaacacagaggaaaatgaaagggttagaaaataattggagcgcttctccctttacccttgtagaagacagctctccggttttcagctccactcattctgtcctccattggaagctcccccagtgtcttagagatggatgatgtaaaagttagaaaatgcctgtgtttcctgcttgccttaatttaagaaactgcttgactgaaaagtgactgaatttcatttataggataaaatacttgatctccagggaagccaggcctcaatagatggatttttaccatgtcacttccccctagacctgtgggaactgacctgagtcttggggaaaatttgagccacatggcagtccgcaggtgcccacaagtccctctatgatctgagtacctgtcttcccagtctcatctcacctccctcctctccagccagggggacgtgcaccctatacccaccccatgcacacctgtcccaggctctggctttcagctcctaccccagaaatgcccacctccccccatagctcagtgtacccaagcttggcccatcctaaagccatctctgataactccaccacaacctgtcttggtccaagctggaagtgatgagtgaactctcagaataaataatagtagctcacatttcttgagctaagagccagacacttcacaaactcactctcacatttctttttttgttagtttgtttgtttgggagacagtcacgctccatcacccaggctggaatgcagtggcataatctcggctcactgtaacctccacctcctgggttcaagcttttctctggcctcagcctcccaagtacctgggactacaggcgcacaccaccatacctggataatttttgtatttttagtagagatagggtttcaacatgttggccaggctggtctcgagctcctgacctcaagtgatccaccgatcttggcctcccgaaagtgctaggattataagcatgagccactgcgcccagccagctcactctcaacttaatcctggaacaaccatataatataggtattactatgatttatccccatttcatagaggaggtaattaggacttagggaggttatgcaagttacccaaggtcatatagttgataagtatcagagccaagagttgaactcataccacctttcccaagagcaccttgagctactagaactactgcacgcttgttttgtaacatttacagaactatagttcagtgggcaaaggccatgcatgattcttcacacctcccacaatactgagccaccagcaatcaatgcatgaataaatgaatgaatgagaaaatacccacagactagagagttaaggcaacttttacaaacattaaaaggatgccatgtcaacaaaaacacattaagcaccaaccgtgtggtccacattctgacgggctctaggcctcggagttgaagccagggtccactggactttcagatgttcaatgaattcccactttccaacctagaagacagtcttctatcgaggactgcttttcagtctcctagctgctgctttgttcattattgctcagcaaacagtgtgatttatgcatgagacacacaccttaagatgcaatgtagttcttccaactgtcataactactaaattgaattgaatggcaatctactggtagctcaacttctgcaggaaaaaataatcagcctgaaaataatcaatgcaatagcactgtagtgacactgtcgaaaactgtacaaacagtaggaaaggtaatgttgtgactgtcatttattaatgcagagttctagtgttcctaagataaagatcattgaaatgtgaagcgcatttgtccaaacagaatttctaataaatacctttgattgttcctttgtctctatcctttactaaagtcaggcaattagcagtgtttgcaatattacaggcaaatgaaattgggtctctgcctggtccgcctacagaggacttctatagcaataaaaataatcaactggattcttcgttttctgctgggtccatgtgatttccttaataatgtcaatgcagattgtaatttgtaggaaaaaaatactgcttgcatcaggcatgaaatttaagaccacagaaatgccatcttttcttacagaattgttttgttacaagggtatgtggcttggacgattagaagagacctcaggtgtggtgcccaattcatctttcatagaccaatattttgtttcccaaatgtgccttgtacatttctccaataccttcactctctagctgttggtgagggaaaggacaaaaattagagtcataaaatcaccattaaccccccagcttgaccactcactagctagtcatttaggctccgtgggcctcagtttgcttctctgtaaaatgaggcagaaaactatgaaagtgcctccaatctaagttccccaggctcctaagacaaggcctggcccatagaaggcacacagtacatgttgcttgagcaaataagtcagtttcttgtatggtatctggcatgtgatcagcataattaatggttgcttaaaaattaacagtctgttccccaccagtaacattcatcttcttcctcttggcctggtgaaatcttacgcattcttcaaagctaacatcacattctgctttgtctgagaaaccttcccaagaccacaccaactagaagtgatctatctccctaaactcctaagacatgtgttgtccataagcttcattcattcattcattcattttatgtatttatttattttcgaaatggagtctcgctttgtcacccaagctggagagcagcggcgcaatctcggctcactgcaacctctgtttcctgggttcaagcgattctcctgccttggcgtctcaagtagatgggattacaggtgcctgccaccacacctgactaatttttgtatttttagtagagatgaggtttcactatgttggccaggttgatcccaaacccctgacctcaagtgatccgcccccaccttggcctcccaaagtgctgggattacaggtgtgagccactgtgcccggcctataagtttcatttaaaacaagcttgtccaaccttcagcccaggactgccttggtccagaagctttgaatgcagcccaacacaaattcataaactttcttgaaacgttatgagattttttcatgattttctttttgtagcttatcagctaccgttagttttagtgtattttatgtgtggcccaagacaattcttcttccaatgtggcccagggaagccaaaagattggactgtcctgatttagaacttgggactcatggccttgtactgtaggttcccctctcaaaggatttcttagctgttcagttatgtcacaagcttctcggaggcaggtccagagacttcggttcctggtgatttaaacagcccctagtcaagagcatggcacacaacagatgttccataagcatccacagattgactgggggaaatgtccaattcccatggagatggtcagatgccctggagaggccacagtgattacaagccctacagccctccatgggatacactgggccaaagacactggtacagaagacttgtcttctgtagaaagtttgctccatttcgctaaatatcttcccatttgtaaggaaactgatatcctcatgacttgtggtgggagggaaattgtacaacctcttcaggggacagagtgacaatgactctcaaagtttaaatgcacatacaattttaaaagattaaaaaaaccataaatgtcctttgacacagtaattgcacttataaatgtttatctcacagactgacctacacatgtatgagaaaagtcattgagaagattcacttttgggttatctgtagtagcaaaagactggaaacaaatgtctatcaacaggtaactggataaataaatcaggatatatccatgtacaagaacactatgcagccttttaaaagactgaagttggccaggcacgacagctcacacctgtactcccagcactttgagactgaggcaggcagatcacctgaggtcaggagttcaagaccagcttggccaacatggcgaaaccccatctcttctaaaaaaatataaaaattagccaggcctggcacctgtaaccccagctactcgagaggctgaggcagggagaattgcttgaacctgggaggcagaggttacggtgagccgagatcgggccactgcactccagcctggccagcagagcgagactccatctctaaataaatagatagaataaagtagaaatgtatgtacttgtgtagaatattctccaagatataagtgaaaagacaaggtgccaaccagtatgcatggcttcatccagcttatgtaaaaagggagatgtacacatgtgcacttgtatgtgcctatcctgtctccagaacaatagcaacggctgacttggggcagcagggaaagagcctggggtcagaagcaggaggagacttgtcactatattcggtattctcattcatatggactaaattttttagcaagtgcatgcattatctttcttttaaattttaactttatttttaatcagatgatgaagtcacatgcacaaaatcatgaaaggtacaaaatggtacatggtaaaacgtcttcctcccagccctgtccccagccacccagtttccagcctagagacacctaataggaaccctttcctctgccctttttagagacagtccatgcattgcagagattttcttttaaaataatcacaatgaagtgaactgggagaaagcttccattgacctcaccaccctctccagctcatgctctgttctccagagccaagctttcacacagggttgtctacgtgtatggagtggtgaaaaagagttccttgggctttggagtcagacaaacctgagtcttcaatagttgacctaacctctctaggtcttatggcttcatccataaaatggacaattcatacctggctcttaggttgttataagggtaagaaacagtccatgaaaagcatatgggtcacttagccacagccactctaaatttctgggcaccagcaccctccatggctgggaccaatcctcactgagcagtgttcctgggcacagccagagaccccaagacccctggatgtccccctaatcccctgagaagtacatcctgtatttctgaggtaacattttacggtaaacttctacagcaagcaaaaaaccttaaggagctcatgatcaagaccagtcctccctgggtttgggggcttttgaaagggcccaggtttagacatcaggaaacctgtatttgaggcctgactctgccattaactgagcctcctggagtgattcgcttctcatcccaagccttgcacagactgggtggtgattcctgaggcccagaacctggccagccttatagcgtcagtcagggatgtgttagtggagcccttcactcagcgaaagcatagctggctgagtctctagacagagagtgtgttgttcaggctaaactatctccctaccatggacataaaatgacatgggtatagaacacactaaattcttcaaggtaacaaatttaaattcttcaaaaagggagtggctatttaaaatatctctagttcatttttagcattactgaaattcaatgtaaatcacagtggccatatagagttgacatataaccctccctctgtcaaacaccaggttactaaagtcacagggattaagaaatgacccttggtaacaaaagttaccaatgtagaccagttatgtggcaggtggggagagctattctaaggttccttctaactccaaggggctcagatcggatatttggcaagtaagcaattggcacactgaccctgcagtttacaaagtgattcctacgatcctgagggtagaagaagattttgctcctggcagaggttttgcaggatgtgggtggggttggagaggaggctgctgtgagggtagaagggggtaacctctgtcccttcaccatgtttatcttgccatatcaccatccagcattcacagtccattgcccaaaataaaccacagatacaaagtagaaagatacttcatctattttctaagtaaatctaggaagttaaagatcacagctgtctccaagaccatgcccgttgagtaaaaatatctcttggcaagttgtcctacatcaattttttttaatgagacctcttttttcctacctagtattgataatttaatagctctgcaaaaagtgcttctgaagcaagaaaacttagtattttctaatttattctctgggagatttgactgctaatcaaatatcttaattccctccatacttaaagggggcattttaaagtgactttcccagccgttccaaattacttcttgaggtttattgtttgcttttaaatttatgtccaacatgggctctcttcttggggactgagctgtttcagaaaatgatggaaatttggggtgaatctaccaacagtgttcagtctttccaaaaagacagttcattaaaagctgaaaggtttgaccctctggctctatctttttggcctaacatcctaacacaggtgtggacagggtcaagcatgcaggcctgtctctgatacctggttatagcaaggctgtccttggcatttcacctccacctcttctgcatcatacattgtttattttcacctcattattccattcctactccatttggtgataatccactgtgtgctaggcacccttctgggcaccagcatatagaaaaatgccttagcattcgtccctgccctcaaaagggccttgggatcaagaagaagtggacacgagcacatctgactaaacacaacatcatggagggtgtatccaggatatgagcaaaatgctcagagacaactctttttatttacgtcacaaatgcttctacagcacctactatgggccaggcatcatgctaataagggctttaccaatattaattcatttaatcctcacagcaacccactgagatgaatactattcttatcctttggtactgtggggaaactgaggcacagagcagggaaataacttgcccaaggttacacagccagtcagctccaggtggggctcatggggcatgggccctggagcccacacactctgactccagggcccacactcctaccgtcgggccacactgcctcacaacacactttctcgccaaattcagagacacataactaaaaccacttacaaatggagtatgccaactgagaatgctacagaacacattgaggaagtgacatttacactaaaatctgaatgatgaacaggagttaactagactaacaggggaggaagtgggttgcaagccgtggttctgggtggggaaggagtgcaatgtgttccaggaactcaccaaggccaccagaaaaggagggtggaaaagaaggaagaaaacagctcaagaagaggctaaaacatgagcagcaaccatagcattcagcaccctcactacaggccaagggtcattccgtagttgggttccgcaagaatgataggaacctaacagctttggcaggggtaatagcatcagttatgcatcatccactgatcacttgggctgacatgtagaatgcattggaagaggacggcggggttaagcagggagaccccgggggaggcagcagcaaggagagagttgatactcccttggatgggctggaggtggataaaaatggattcaagtgagttttaggagacagtatcaacatgttatgctgcatgtttgcttatgatgggtgaggagagggaggagtcaatggtggctctgaagattctaggtattcacagggtcgggaagcacttgtttgtcacaggtttgttgggtgccggaggggaagaaagtcccgtgcaacagccacatgcaatgttcatcactcccctggctctcaggctgcttcagggctccagaccctcgcacgtgctgatctcgggctaagggctgtttccttccttcgactgaagacctttcatactgtaagattcagcttgaaagtctctccctccatacacatcacacgctgacactggaccaggcacttatttggatctcacaacatctctgcaaagaagatattgctatgcctgttttacagactactgagaatcagagaagttccaaagctgccctgtcatttgtggcataagcgagagagcccactgacatcccagcgctgccttcccagccacactgagggagaggtgggcttggcccttgaggccccttcttctcaaaggcattgaggttactttccatgtagattacggttgagaacaatgagaacttctggagcacattctgtgggctgtgtgaggacgtcggcaagggaacagactaagatggctagaaaatgcccctctttcatctctagaattcatctagtgaagcacttcccaagcctcaggtatccagggtctccctgttcttcctagaagtaggttccagtgaacagaaagcccacagcataactaagaaaaagctgtgtgtctctaccatgctggtgaatccatgctgctccttgacctgccactccttgacatggacggctctattctaacagtgccactctctcatgtcactgtccctctgcctggttcctcctcctctcttatctgcctggagagtcccactccttggatgagtctcacccagagcatccctcccccatctcctcaggctgggtgtagggtgaccagctgtcctagtatgactgggcctaacggatgttctggtttgtgggactttgggtagtatatcagctcaatcccatgcaaaccaggatggttggtcaccctagttaggcatgtggattgcccctgcttatggcaagcccagcaagtatccaagctgtcttgcactcattggttctctcctctgctctttccccaaaagtagttatgaccctctgagatgaagccctgtgccttgttcatcactgtattctcaacatctaggcctggtacagaccaggttgtgtggtcaatgtttgtgcaatgaacgtacgagcccagactcagcatatttaggagatggctcctaccacccagcaattagagaggggaggcaacgcaggcggaggacatctaccaatgcagcacatgagcaagacacagggcctgagaataactgaaccctggcccacagatgccaaagaactggttttgcttgtttgtttcatttgccagtcagaagcgtgggggataatttagtggaatcccttcacagataggttttaacttgaaataattcaactataggtgcttggcaaacaatcaaatagtgaacaggcccaagagagaaggaaataatttagatggcagatggcagttggctccactagaagtgccacctggtgagcacgggcccacagtgggtgtgaggcgggacaacgggggcacacttccctcctgcgtgtgtacctcacactgtgctaggatgattatggttctggcatacaaagtcacttatttttcatgcaacctggtccctaaacttaagaaaatgcctttatctggtaatcaactgggaaaaacattggctgaaccccatactttcaagtacttatgagattttcaaaggtggttcttacacactaacttaagagtccccagatggtgagtcccagctgcgccacttcataactaaatgatcttaagtagctaatgacttaaccttgtagagcttccattctcatgggcaaatgaaggataacatctctccctcatgggctcacagtgaggattaaacgaagggaaggtatgcacaacagttagcagactgcttggtacaaagtaagcgctcaataaaccaaagctattatttttagtggtggtaatagcactgcttttctttggcatttaaagctgtgtagctaatctgggcattccaccaggttgctgaagcaatagacggccccttaataaatagcttccagacagcatgtcatttaaaactgaatgcatttttgcttctcagttgttggacatattatttactacctgatggtcttgctctggcccaaacaagctaattattgcaattccagagtacatgccatcatccagaaatagctttctgtagagtggggactgaaattaacaggcaattagcaagtttaaaaggatttcctttccccatccccacccctggcacctctaacacattaaagctcatcacagcagttattttaaggaaattcagcagaggtacttgcagggcccgaggtcatcttgtgttggccctggatagatcatgaaatcctgttgccaaggagcatggtgggaatgtggcaggaaggctaaagtcaggaaagccacctcagccactaagtagccatatggcctggggcaagccactactcaactctgagcttcagtttcttcatcagtaaggaagtggccaggcacggtagctcacacctgtaatccagaacttggggaggccaaggccagtggatccctcgaggtcaggaggtcaaggccagtctggccaacatggaaaacccccatttctactaaaactacaaaaattagccgggcatggtagcaaacacctgtaatcccagctactcaggaggctgaggcaggaggatggcttgaatccaagaggcggaggtggcatgagccaagatcatgccactactcccaagcctgggcaatggagactccatctcaataaataaagttaagaagttagactgctcaattcctgagactccttccaacccagcaatctgacgtccacactggggctgaccactgaactacatggaggcacatgcctcagtttccttatctacgccattcatctaacagctatgtatcaatccctgttaggcactaggcactgtgctaggtgtttggaagagtcattctcaggcctatcctatctcagcaacctgtaggaatgtcctcacctccagagttagcccccttggaaggaaaatatttagtcccacattcatttctttcctatatgaacctggaatcactgggggcagcctctctgaactgccccattttctgaaaagtgtccgaagtacagcccaggcatggggcattcagcacaaagggcccaagtcttgagagggagtagtttaggagtgaagaaatcccagcctcccactatccagtcttaaggtaaaaagaattgtacagatgagcacctttcttccccttggtatttccctttggcatgacccaaagaccactcccataaagggccataccctagtgttttctgacaatctagggatgaattccctattacatctcaggatgggagaaaaacaggatttgggagttctggtttaatcactaaatgaacttaatcttgacttctggttttgtcatctgcaaaaggcaagtggtcctgatggctacttaataaagctgtctgtgagccaaatgagagtgtgcatctgcaagtgcattgtaaactgcaaaaataattgtggttctctctgggccgccttctacttcacaacaatactgagctgaccttacagataagctgaacagatggttgcctccatggtagtatttgaatagcaccagaaagtttcacctctccaaagcatctttctgctggcctgaaattcaaccattagggattcattttgttgcgggggcgggggggcggcttacaagcttcccagggttcaggagcactctattaaatagctgttgtaatcacccagcaggttcttcctattcgctgcatagacaaaaccagttcaccaagaccacgctattgtagtagagtttaacacaaagccagctacgcagaagacagttattactccaatcagtctccctgaatgctcagcggttagggtttttcaaggatagtttgatgtacaggggattagggaatgggtgctgcagattggttggggatgaaatcatagggttatggaaaacggtccttgtgcactcagttggcctctgggtgggggccccaagactggctgagtcatgagcctcaagtccggatgtagtcagtctaaaaaacaactcaaaagatccatcttaggctctacaatagtgatgttatctacagaagcaattaggcaagtcacaaatcttgtgacctctggccacatgacccctgagcagtaagggatgatagaaaatttgcctatatcttagcagaattcaggcccctttcataatcctgaccttctggcctttcactggttttgcaaaagtggttgagtttggggagtggctattatccttgctgtaaggttcaactataaactaaattcctcccaaagttagcttggcctacacctaggaatgaccaaggacagcttggaggttaaaagcaagatggagtcaactatgtcagatttctctgtcatcatttcacaaaggcagtttcactgtgacctgctaatactgtggggaaaagaaaaaaacagtactcattgggccttaggcatattctaggttctttgcaatacttaattttgtttttaatctcaaaccagtctgagacaggatttactattcagcacatttttgaaactgggaaaatgagtctcgagatgtttaggaaacttgctaaaaggtcacatgagtgacagggttaggacttaaacatgcgtggggtcgggaagatggcaggcacagggtatcaggccaggggagatgccctagagccagcgacactcagcctacttaacttcttctaagagccggtcacctccataaggacagccagagcttctgccaggaaagaaagaacgttgatgctattcgttttccaaaagagcgtatctcctccggctaatctgaacatatttcttacagggctcttgaatgcccctttgtagctgagtgggtgaaacggcatcaccaacatttggccctgctgctccactgagagccggcgccgttcgcgggataattatcctgtagtcttctcacctccggagagaatgcaaggcgccctccttccaaatctggcccgtcacgccagcaccacttatttttagaagctgttttcccctcatagtttcacaacctctaatctgccactctccagtgaatataaattaaaacacaacaatgaaatatggagaaatgttttctcccgtcatctccagctctctgaacccggggctgggagtgggtggagcgcctgatttgtctcccaggcgacacggaaagggaggcagtgagacgtgctacctggtcgcttccggctctgatgaaccactgccagccagttattagggaggagggcagcacttgcaaaaatttcaggtctctgagagcccagagcctgagaagtgtggaggatactaattacacccaggtggaagcctggccacagctcacctcctaaggaaagagcgagcccattaaatagccaggaaggaatggagttcacaggggattagatttctagattatagcctcagagtcattctcaaatttatctcctaaaatctggaggtcaaggaacaaaagcacccttgaagaacaggtaaagggagcctggtctgaattcttagctcctgacagccaggccgcaagaggacagacatcccgtgcacacacgcccgccccatcgccaaagaaagctctagagctagacacttagactggcctttcatgaaatgacagcacctgccaaacacaatagggaaatagttagtccagccaggcagtgccatagagtggtcagagcatgggaatttcaagcagacagcagcaggctttaatcctcactctactctccccagatgtgtcaccaaggcaagtcactcagcttctctgaggctcagtttcctggcctgtagagtgggaataattataatactatcttggttgtcaggtttaaaagaccaaatgaatgtcactgcctggcagactacttaaaacaataagaggtgctaaagttactttaaaccaaccctctccaccctctccttccccacctcagtttcataccccagagaccaaattcctgatggattcctaaatgatatctctgccaaatactggtgccaggtgctgggcaaggcacagttttgcaaccagctgtcaggcagcaacaacttcacagtcgtacttttattcagtgtgtggtaaaacttctgggacaagagtcaaagtcgtagggctttagtgggaaactgccattgcctgaccagaggtacaaagcactggcccttccctcatccctggcctgacctaagagggctggggtaccacaggactgttgaccccactgagagctcagggtgccagaaacactgcctgccacgtgattcctattggtccttccagagatgctaacaggcctggaggctggaggtctctctgcccacactttcacacatgacctggagcagggggtcccagctctgtagctgcatttctgacccagttggataccttgacatggtcccagcaagcaacagagcacccattgtacagccttccccagccccagagagggactgtccctgccaagaacagaggtgccacccagaatctgacagcaggggaggctccccaagcattctacccagaagaacaagcaccctccccagatggcctgtggcccaccctgccctcagttcctagcagatcctcaacttggcctgctttgatgtttgtgaatggcaggtaggaaaggtcaggcaagtggaagaaacctaaaaccatgctctctatggccatggaagcttcctaggtattattacatagctgtagtatattaatattactgtcattaattgatattattgtaatgttactataatatacatagccataatataaacacattataaagctgtaatagcttatctttattctactatgtggcaagtctgtactaagcattctcctactctaaacccccacaaaagtattagctatgaactatcattgaatttcgttttacaaacaaggacaatccaaagaggccaagttacctgcccaaggccacacagtccacaagagcccaagttcccactcaggcccattcttttagctctgtgccacccagctctgcaaatgtagccacccaaagccaatcaagccagtggtagagttctaaaaccaaatctagggctctgtcccaccaatctccacctggtgcctggaattcctctatttttgttttttgttctgttttgttttaaagtttcactcacccccctccttaaacccaaatatccctgggacaggatggaaatccataaacaggtgcctgagtaagacatcattcacagagccttttcctcctgacagctggccaagaacaggagagggggccctgggcaaatctgcaggattacatcagagcttattttcccccgtatgcccctaattttctacatgctcttccattcctgatggattcctaaatgatatctctgctaaatcctggcgccaggtgctcttccattctcccagtgatccagaactttcttgctgtcatgaagaaaactgatttaataagtaaactcatacttaggaagcttcccatccaccctggccccccatggtatctcacatcatcatcagaccaaaagaacccataccctcatcagtgatgactcagcaaaatcaacttcacatgattaggaagctcacataactagcaaggcgaggaggttctctctgccggccacctcctcccgccagcactccaccacagcctgcctactgtctgcccgtttggactagcagctggtgctgtgggatctttaactccactgaaattatgtcacaaaactggggcatcgtagggaacctaggaaaacagacaagaaataaagactccatatgtgcctggcccacacccgagtttggctcactatgcacacattagatcctgccattcacaatttaaaatatatatatatttttttgtgtatatatacatatatacacacctagaaaaaaagtatgtattttgtatatatacaaaatttattacatataaataaaatttatacaaaatttattacgtataaataaaatttatacaaaatttattacgtataaataaaatttatacaaaatttattacgtataaataaaatttatacaaaatttattacgtataaataaaatttatacaaaattttgtatatatttgtatatgtgaaatattttttaaatgttaatatatctataatatttatatatttgaatatataagtttatatatatttatatggctcactataaaagaaattgaaacctccttaagcatgaacaactcccacgggtgttttcttcatgagacgcacaggaagatggcaatgggtactgaaaggaatgaattgcttgtgggggaactttatttactagaacaaccccaggtaggaggagaggttttaagaaatgagagtaggggttctggaggaggtcaccttgcctcctagtacagaggtaagactccactgaggctggagaataatgctcatgaggagattggcaggccccagatccctgcagctactgggacagaggcttcagttccttgccatgggggcctctccctaaagctgctcacaacatggcagttggcttctcccacagcaagagagagaatccccagagagagcaagaggctccacaatggaaggcctagtctttcacaatctaatcccagcagtgacatacccatcacttctgctctgttattggtcagaccaaccctggtgcaatgtgggagaggaccacacagggtacaaatcctgggaggcaggggcccttgggccatttgaagggtggttactccagcaggtacagagtatggtgagcccacatgaggaggtgcccagattgcagccatagatccttgggcaggtcatccaacctcatttacgctgtttgcacttacagaaaatgagaataatagactcgtcagggcttggcaatgcctatgaaagtgcattgaacaaagggaagtatgctgcagatataagacaacatggttttgattgtaattactagtaccagtagcacatagttgtgaggactcctattctgttgagctaacagccctgacccacctgtatcaatcagtgccaatgtatatttcacattgccaatacccagcgtcagataatgaagttttgcaaaatacagcttgggtgggatctctttaatgacctgttaaaactgatttatagttagctttttacctgaatgcacataaggaatctggagttcttgctagttcttgcttggaaatgatctgtttcttcatctgaatgtcctcccttcatctgatttccttagcaaccctggtttttctgttttgattgacaatacaaaattaaatattagtccagtccctcactgggctatcacaggttccaaaacacccagccctcatgtcattgatccaacatcaaccgttccaccggtccttccctcccctgcccccttaccctgccctaagggctctcaagacagacctgtttaactctgggcatttagaacacagaagactttctcaccagggaatctctctttctaaaatccccacagagctggtcaagcaagaagagcactggactacgcatcaagacctggggtgctgatcccgactctcatccttgactgcagtgtgggctgggcaggtcacttcactgctctgagcgatttagttctggttttgaaagactgggtgattctacccattattcactgagcacctctgggccttctattatggcctcctccctttcctgccctgcagctccctgccaaaaacaaagcctatgcaaccttcgtagatactcttcatagaatctgtttctctccctgtgggctctttccttctgagcactggcaggacttaaccatatgctctaggcattgggtgtgaaaccagcaaggcttggtgctggaaatttagcctcatcttcccaaccaccatagctaactcttgtcaagtacttgctctgtgtgccaggcactgttctacctcattaaaacttcacagcaacgctgaagtggctattatcatcttcattttatagatgaggaaattgaggctcagagagagtaagtaacttattcaaagtcacccagcccacatgaggcagagccaggattcatgcccaagcagtccagaacccaagcacgctgtcttgggactggattttctttccccatgaagaatgtaaatttcttaatcacaggccctgtttattttacacacagtcagcatctacaagtctttgttaactgattacaggtttctgtaattctaggcatgttaagcgtagggtcaagcataaactctgtccctacctttccagaacatatgctctgatatattatagcagacaaatgcaaaatttccaagactcgtgggatttagaagggatttttctcaactcttcttttccagataagaaaagggaagcttgaggagattaagttacttctgaccacatagctccctgctgcagaaccaggacagaaacccaagccttctcatccctatcacgagttggatctagggcagtggttctcagtggttctcaactgggatggtttcgctccctcaccccatgggacatttggcaatatctgggggcatctttgcttggcacagctggagaagaggatgttactggtatctagtgagaagccaggggtgctgttaaacatcctacaatgcaccagacagccttcacagtagaatcatgtggcccaaaatgtcaatagttctgaagttgagagatccattctgtgggatttaccacttcctctaaggctctttgtttctgtatctttacaagcagtcatctacagttggacaccttgtcttattcatccttggctccagtgctcagagaagtgcctggcacgtaataaaagctcattgaacaagggagggaaggagagagggagaaaaggaagggaaagaatgacagaaaaagatatcaggctttcctggcaggcaaagaaagtccaacactataaatcaagacctctgttcataaaacagaagatgtctgactgtttgaaatcaattcttgtatatcattccagagagaagactaactccgaataccttaattatgcgttagcacaatttagacgaatactcacaaaattaagcagagaacccaagccctgctacagaagtcttccccctcaaaaaaaaaaaaaaaaattaagatggagtctccctctgtcacccaggctggagtgcagtggttcaatctctccagggattacaggtctgcgccactgcacccggctcatttttgtatttttagtagagatagggtttcactatgttggccaggctggtctccaacccctgacctcaggttatccacccgcctcagcctcccaaagtgctgggattacaggcataagccaccgcgcccggcccttttaaagtaaatcttgattgatggacatgatgaagtccgtgaggtacaaatgcactgccttttacaaaagtaactggttccttggaggtgtccattgggaagatggcagtagttagagctgccactgaggaagacataataggcagctctcattccaaggcagctgagccacgaagaaggctggcctgagtggtcagtgtgcagtaaatccaaatctttaaatgcagttcatgcttcacccccgaccgaatgacaaatggctcccccgtcagagcaagctggcaggtgatgcaccactcctcccctcccctgccacccgtggtgggacaatctgtcagcagccactaattctcaggaatggatggggaagtgggggaagtcaggctgtgtttattgggcaaggagaaggggtctctgagcccaaagaccttcttgggaaatgcagctcctgccctccacagcaaataatgctcaatgaccagtcagggagagcttgtctgggctctcttcaagctatggggagcatctagaaaatgccttgaaaccgtcagatggaaacatcctctcatcttcctccctcctggaagcaatgtgctccgccgctcttccaaacccttcctgtctctactggtacacctctccaaagccctctggatacctcccatgatatgcctttcccaggctccaggtcagcacaatgctctccccactctattccccaaatgcatacctgtctccatcgcagacaccttcacatgcctggctggcaggagctcagccctgcccatctgcctgtctttgttgtgcgaccaccttcagggtcctcccttgggctcagcagtgagctgacttgccatggagccaatggagcttaggtgtcaagatccttcacttgcacaagcccctttcaacctcctctcccccaacacacaattatgtattcatgatgtattttttttcttaaagaggacctccaaattatatctaagattcaggctctgtagaacctggctctttccggccaaaatatgatctttacagagctcaacatgccttgcacacactaggtgtttaataagagctgaaggatcaaagagaatggatcctgaccatgattacaattaattaagaaagtgattaacaggaaagggaagattggtgtttctctcaggcgagctttcctaattcttcctctaccatcaaactgaaaaaagccaatagtctcccctatctcaaatccaggatcctcggaagggtttgttaagtcacagccagctggaccccacctcgcaaggatgtggttcaataggtctagagcgggacttacaatctgcatttctaacaaattcctggtgatgttgccgctgctggtccgaggccctcactctgagaatcactttgagcccctgcgttatcaataggggccatattgcccccaagagggtgaaattgtatcttgaggtgggtgatgaaaaaagtttttattataaagcagatatatatatatacacacacacatatatatacagtacacaaacagggtgcagtatatccctggtgctaaaacttcacgggtagacaattagggggtaaaaatgtctagaaagactctttaggggggcaatcatgataaaacattgagaaacactgacctggcccaagtgcctacttggtgcttactccccagcagctgagccagaagccctcacctgcagagacctgcagcccacaccatctgatactgtggaagaagcattagactgggagtcacaaaacccaggttcaaatcctagctctgcagtaacttcaggccttcccagccacacccacttcagcttctgtactgaaagagacaaagttacaaccaaaactgccagggaaagaatgctgtgcgtgcttggaagagatacatgagggggttgtttatacaaataggagtgagcaatactccacagggcattgttgagtagcaaaagcaacacattaaaccatctcccaaggaggctgggcctgtcaacggccttgcttcgctgagcatggaaaagcacgtgtcaggcagagcaggattactcggcacaagagaggccaggctggggtgggaagaatggagagacagtgcctgccagtgacaggctggggcagggcgagaacaccagggaacatgcacatcgatcctgatttgagcaagtgttctcagaggcagctctataaattccttcaccacccctaagaattttgtactttgtcgcctgcctctaaacaatgcctttggggacagcagattctttgggggtagagccaaaagaggctgagtctactttaatgttatgctggctcaaaaacagactcacacatagtgggaaccaccagactcctgggttacaagtcttgtgtctctgttaactatgtgtccaatctcccaggccctaaactaggattctttaggaatgagtatgtaacaggaaagggaagatctgtgtttccctgaagcagctttcataattcttctaccatcaacctgaaaagaaccaatagtctcctctatctctaaaccagattcccatttcttccttagaaactatgtccagtcagccaccgaaccctataagttgatcccagtggatcaactcttccgctccggtttctctgagcacctaggaactggtccctgtgtctctcctggggggatccatttcttatccaggccccagctctgcctgtccagcccaggagccacccgaaatgctaaatctgtcttcttgctaaacaagttggattgtcataactgtatagccctggtctaagtgaggttggataacagaagtggtctaggaaaactgtgtcctggggaggaggtaaagtgataaataggatgtggtcacggtgtcctaggcagtagcccctcacaatgccagtggatgtcaggatcacgaatcagggaggtctgtttcggtagaagacatgagttggggaggtctgatttggtacaagagatccagaacttgtgtccagctggagtaaggagagtaaggtatagcagagacaggacaaagtaaattggacctcagagacagggcacggggcagagtctgattccaactgaaacgtaaggatccccacatccctcaacagtccctcagatggtgaggtttaggacacagtaaggaggggtggaaagagcatgggtttgggtatgtcttccctcatgaaaaccgtggagccagaagcagtagtgttacagtgatgtcatcccctgaggctcagtttcctcgtaggtaaggtgggaatggaaatgactgctgcataggctgtgagatgattttgtgagatgtaagcgcccaacagatggtggtgatgacgatgttggaatcaggtgactctagcctcttcactgtcacgcttgctctcgtctgaacgtgcttccatgtctccatgttgctcttgtgtccacaagcaaaagcaataatccattgccatttaaccagcacaaaactgaatgaggctgtcaccttccttttctgaaacacatgcttcagacagcgcagtctacagtcacttgagggctgggagaagatgctgtacaatatttactcctgttgaaaattataatcaataagtccctgactgttttcatatgtgctgctactaagctaccactccctgaccttgagcagatagatttgggatccacgtgtagccctgttaaattttgtcttttcagatttagtctctccctctctcttctccccccaccacccccctctccccccaccaccccccttctcatcctttttgacacttttagatttgatatctcttctagcttcttgacatctgaaatgtggtgaactcatcctctatattatccaaatcaatgacaaaactcttgactaagacaaagccacgtcaaaacacaggaacccctacccccttggaagacacaccaggccattcattgatacttttggggtgcattgctcccattagtgacacaaccttaccattctcgcagccaatccatatttctcccatctttcctcatgggcatcactgagaaaccttagcaaatctgcttcccagacccttctgttctcctttcactccctcatttgatcagcctctgggtcctgctgactccaccttaaaatgcctcctgtgcaccctttcctctgcgtctctacaaccgcacgcctcacagggatttgtcatctcctcccagaacattgcagtgatttcctaacaggccccctcgcctatatacctagactctttctgggagggatttaaggtggctcagcctatgtatattcacatgtctccacctactcccaatgtgatcattacctagaggcctctcatactttttttttttttttttaatgcctgaagtttttttgtttattcctttttgttttccagctctacccaccagtatttttttgttgatgacagatcttctcctaaaatgacaaagaatttagaaacattttccatgtatttttaacatctgcgtcagtgaacaaagaaatcatagttgatgatggggtggggagggagaaaagggaaacttaattagctttagtttttataagaacttccatcagcgctgaatgaactggaatatgacatctgattgggcctaatcacaaggaagagtacattaacttgccgtgaatatatttaccagtttttacaataccatttttaaatctctacagaagccaattttcttacaagaaaattaccctaccaagattttttttagaacaagcaaacccaaatttctttcttaccctaacccagttcatccagctctgacactgtggcctgaggacagacactgatgctatcttggagcctctgcctctccacccttcaggaatgttctgcaccctgaaggaggtaggaaaacttgaggatgcaaagaaaaaccagacatctgttatgtctcttgatgttagggagtgggagtgaaattccagctcacccactctcctggggaggctagaatttaatgggatgcttgagatgcgtgggccgagggtgaggctgcagccaaagatgcttgaggctggacctgaaggtgatttagtgaccagagggcaatgccagggagagagagccttgcacggagttagtgacactacagttcccagagtggggcaggaagaagcaggcacaccatgacatcttctcattttctttccttctctgccgttccccagatgccccctcaccaattcatcagccctttctttccttccacacaagctgctcagcactttggctctgctctggaaacatttccattcctgtgctgctacagaacccaccctccccaccagattggatgcacctggacagcaggattgtgacttagctgccatcccgagttttacctggcacacgcaggtgctaggtagtattccttcaaaacaaggaaaaggtggtgtcgcatccctacttagctcctaccgttgggttggtttgcaaattttgcattgaattccatgtaattttctctttttttttttttgtttgtttttatgaaaacgtatcatttagcctgccttaactcttgctttgaggtcacaaatgtcaaagtggttaactccaagtcacctccaagaacattattcctattgggttaaggctccacccttttgagctctaattatctccttaatgtgtgagaactgggggaatatgttcccaaattagaaataagttctctaaaactaaggcttccaatgctgaagagaatgtacaaaatgagaaaggcatactcagtccttcacttacacagtcaaagagcaatttttagggcactcccatgtgccagacagcccaacaggctttagggaggcacaaggatgaagaggacatggttatcagcacccccaagcaactctcagcctgtagagctttcctaatcattcaacaggtatttgaggtgctgaaacattgtttaaaaaaaaaaaaaaaagcccaggtgcaaacacttctatcagatgtgccatgcatcattgacaatagtatacacatattatttataatatgtataggtgctttataaatattaactcattttatctccataataactgagctatggacaataaatgattattatggacaatctcttaaccctcacaattcagacagtgttgctaatcccatgtcaaaaagggggaaactgaggtgcagaaaagttaactttcccagagtcacacagcctcttaagtggtagaaccaagattttatttgtcttcctggtgtaagagaacttggtgggttccttaaaccctgttcaggatctgtcactggatttgcctgttgtgcattcagaggctggagaaggagtggagggggcagagtccaaggtaggacactaagagtcagggagaggtgatttgtgaaaggctttaggggcagcgccagcctctggataacagggaccctggtggtaccaaggaatcattggcaggactctgggagatgaggacttggtctgcatggggcagcacctcgcatctgatactggcgcatatcagcaccctactggacacattcaaacaggcagcaccctgtgagtgtctcagcaccagcacatcaaccttccaattcaccaactcactccagggaatgtgaagggcagggttccactgggccgcaccacccagcccggggtggccccaaaggcagaggggatgtgagtgctgtctctgtgagcctaagtaggccctgcacctgccagagacagggcacagagcaagtgtctgagggcaagtcacctggacacagcagtggcagaaaccaaggagtaggcatgccaggcaggtctccagcagcctctgagtttccaggcacagggcccacaccagggtggactttttatatgtacatacacacccacacacccacacccccacccaaacacacacactgcaccagtcccgtttcctcagatggacatttttcagaagaaagccaatgacactagcaagtccatgacccatttcaagatatgacaggacatcattttccaagtggagaaaacaaaaattctcagaaagccctgtataccacagaaatccatacaccagtttcaagtctcatccaacagaccagccagagtgcagggccacagggcaccctggctggagtgaacaagctccctccaaaccccctcaagattctaggcccaccagcataaaagtcctcttgatggtggggtcattccaaccccatctggggttgtaacctctcagagcagaggaaaataaacaggctgttgtcaggcagcccagggcagaagtgatgacacctgctcattctgaatttatctttattatacattatggccacctgtggaccattcagaaaagatgctttttgagtctcaagcaagtgactctttaagccgaatcacaaagaaattcccattttggccagttctgtttctggacgtcaacacccccctctctgtatgaataaggggtcttccagatggccaggaacagcactcaacaggccaaaacaaagcagagggtggcttgagaactacactgctacattcagcctgaggcccagcatcgacctggccttctcccacttccaacaactcattttgtagctttttggttaagaacaaatttggatttcttctttttctcctcccagtaatctcaaatgtatcagaagaaaggaaatttctaccattattgtcagaaacaagacaagtaaaaggccatcctcaaatactagtgttctcttcaccagacagcagcacacgtggagagtagcagatctctaagcacgacccagtgtgtaactccaaatggccccattatcctatctcgaggagagctgcgcatgctgtaccctgttttacatggcctgccatgcttctggtagcaaagcagtaatctcctggttatgtagcactggggatgccaataacagccagataaagaatagaactcatgaggccagttattttcagtcaaaccaagctacaaaaaccacagtcatgcagaagctggaggaaccaccaaggcaaagagaatggaaattcccttatgctagacagcacaggtccccagttttctggggcatctgaaacttgatgtgacagcactgggagaggccaacagtccacgaataggccaggacctaaggggaaaggctaccactctacagccggccatcagggtgctgggctacagcagggctggcaggagcagacggaggccacatgccaactccagcctctgctacatatggtcccagcccccctactcaccagccatgcggcctcaggcaagtgggataatccccgtgtctcagtttcctcatctttaaaaagtgggataataaaagattcatgtactttatagggttgttgtgaggatcaaatgatttaatatacaaaaaaatgttgacaacagggctcaacacaaagtgtgctcaacagctgctgttggtattggtggtggtggtgaatggtctgccagcttggtagggatgtctatgaagtgggacaaacatttcatgagtatgaagatagactgttcagatgatactcatctaatgccattggcagctcctctctttattgtaccaagatctgtttccttcacgtttcacccaacgtcaaccagcccttcccttctttggactaagtctcccttcaacacatcctcaaatgacacagtttccagtcccctcactcttagtcaccctccttggaacaagctcaagttgctaaacaactatctctaaagccagttcccacccgagccaacattccaaggccaaaaaccatcacctctatcatgagttgagtatcctgctttcattaggggactgcactgacgtggctgcaggttgctggtcagccctagggagccagtaccatacagccagtacccgcgagctccctcctcacaagaggcggctgttgcctccttgtgccagagctcctgggctttggatagaggaattccactgcttgggtctcatccttactcaccaacttggaggaacttccatagagtggatggcagccgcccctccccactctgtctctgtggtgtgtgccccacctaggctgtgtttgggtgcctgtagtacctcttcctgttcttgtctcaaacacacacctgtggggctcctttcccagtaccgtgcttcacaacggggctctccttagcccaggaggggagaggctgtgcagaaaggagacttctatgacacccttggggcaagggtgttgttttgctccttccatagatctctgaagccacagctatgcaggagaacagaaatagaagccagccacacccagtcttctttggcatgggcacattgaacgggctcagttctcctgccacgactgaaagggcaccctcccacagaaggcacatgaccactgttccaagacagtccagatcaggagagaggcctttgaccagggcaaagcaggtgctgatgagaaggcacagcaaaggtggcccaaaccactctgcctattccctatccctcccctgttaactccactcacaattccaaacccagagccctagcttctgagatatccaggtaggcgacaagattttctttctctacatgatacagactgctgagaggctcccctaacaaagcaccagtattctccctgaagacacaggctcaaattatgctctattcaaagctggctgtgttcccaactcctaagccctgctggctccctctgccccccaccctgacgtgggggaagatgctacaggtgtgggggtgtgttagtccattctcacactgctaataaagacatatttgagaaatacccgagactaggaaatttatagaggaaacaagcttaactgactcacagttcagcatggcttgggaggcctcaggaaacttacaatcattgcagaggaggaagcaaacacatccttccgcaaatggtggcaacaaggagaaatgcccagcgaaggggtaggggaagctccttataaaaccatcagatctcgtgagaactcactgtcacaagaacaagctgggggaaaccactcccatgattcaatgatcttcacctggtccctcccaggacatgtggggattatgggaactacaattcaatatgagatttaggtggggacacaggcaaatcataggagtggggaaaccaggagaacagggaaataaaattggttttcacaatagctaaactttccctatcctcttgagagtatttctaagcaaaagagaaatatacttttctttttgctttctctaaaaaaagaaggaaagaaggaaggaagaaaaaaatggagggagaggaggagggaaggaaggaaggaaggaagcaaagaagaaaggaaggtcaaactgacttgatttagctcattattaaacatgcaaataagaaaattcctgttcttggaatgtgatcagtcatctgcataaggtcttgcgacatatctacgattgaattatttctttgaatcaaggattcccccggccacacacaaatcagtacttgccttactttggaaaacgaaaagagctcactaaagtggtccctcttataataaggtgagagtggcctctaggacaaatttcagcttgtacaattctggaatacagaaagggtagctggctagcgacctttttccatactccaccaggcactgtgtagaggctaagggaaagcttcccctttgccctctgaaagctcactgaaaactcacagaagacagattagtagaagaaaaggcatacgaatttattttaacatgtctagcactggaggatccatagagaacaattacccattaacccttcttcataggggaaggggagatgggggaaatgtggcaatttgagggatggtaaatgatttttagggggagacgagtggacttggggaacttacaatggccatggacgaagtctgttgggacttcagagcagacaagggctggtaaatgattctctttgaaatactgaatgagcaccaaaacagaagacgatggtttgtgacaaaatactgtccaggtgtgttgacagacttcagtctttcttcctgtgatatgggttcagttgatgaaaactcagggaggagactagaggtaattgctttcttccttggtatttccagactttaggcagataagggatgaagagaacaacttcatccagagctttgggagagatgaagaattgagagatggggtagggccaagggtggggggtagggagtgaagatcagagagaccctgaggctcttcttatttcagcatgtcaaagcaccatattttggggtaacagttgctgagccccaacaactgccaccccatagtcaaattaagccgatcatccccaaagcaatattagtccagtccagttcctctcatgacaaatgacctgaacacaggattcagcgagtcttactcgctgtggtcattttggaggtagggagatcattaacccacatactttgataaaatacgaaacgcctttcctagctggttcttttcctctcctataggccgacccccctccatccctttattagtattgaactgaacaaattagttaatatgggaacatttggatgtatcaactttgctctgaaacaaaaatgtattcatccccaaactctatgctgggggctgagggagagtccttacgactgacatagtccccaacaaggttctcattagtcccagtttttttttggacaccttttcctccgcattcacatccttctgccctctccagcactgtgcaggaagaaccaaccaacctgaccttggtgaaagggctgtgggtttttcaacccttcattcctgctactttttttttttaattttttagtattcttctgtgcatcctttcttctctcctaggcttctcacccagcctctctgttgagtactacttgtaggcagagctccctcattcacaacatcccaatgtatttgtcctgtatcaaagcaaaccttatacagtagctcttttaagaactgctaaaggaatgaaggaacaaaactgagccaaataaagcaaaatgaagaggatatgtatgcaggcaattgtgggaacatatcaccagaatcctctcttgttattgtacccaaatccacacattctcctcagtgttgtctgggaaatacatcaatccactgtgaatggtttagatagaatagaatccatcaatgtcaccagcttgattcctcctcagatgatgagccactttctccactccacctccagggctggccccagtcttcctaaatgttcattaactcctattaggtattccgaaactctcaggttttctgagtcagcatagaatggttggaaaagcaattgctgtagaatcaagaagactgaaattggaatactggagcaactacctactagccacaggcaggttactctctctgagtctcaggttccccatttgcaaaatgaagcaaagctatctactccaaggattgctgtgaagattaaaagaccacgtgctaacctaataggtgttcagtaaataaatataattttctatttttccctgcaaaattcatttcccaaacacaatctttattcttttttttaacatataatagccatactatggcttaccaactccccagtaagccaggactctctgtatacgcagtgttttgccacatcatttacatggatgaaattgtttcctatactcccaaatttaccctgcttggtgaccaagaatcacttctgtccctattactagtgatatcatgtctgcatttagaaacagacaagtgttatacaaaattacataatatgataggaatgctgtcaatggatatctattattatatttaccagtcaaaattttagttgttataactggtatcaccaattaaaaaattttataagaaaggggtttttgtaccattggatctattgaatcattaaaaaaaaaaagagtttagaaaaagaagaagctatttatatactatttcattccataagactttatccagttccactgttaataaaatgtacatgcgcagaattgtattgttttctccattactaaacatgtatttgctgagtaccttctgaatgccaacatggtgctaggtactgggcatagggtggaagacacaatagacaaggacacagctccctggtatgggaaacagatactttatgtcttcagttgtaaggtccactgttgttcctatttaatatctttgaatgtggaatatatcttacaatgctgtgggctagggcatggttgtgacattgataaaaagggctcttaactgccatcgcttcagttgacttgcttgcctttttgagtggcagtgcatggcttgagcttaatttccattcagaaggtttttgaaaagactaactcattatttgcacataaaaaggcacagagacagaggtgaggcataaatttgatattcatcattagagtaaccatcatcctatgttttcttacaaagtaacaaaaagtgttttatgaaatgtaatcacaatatatgaagctgtgctttactggtgcacatgcaagaggattgcccatcaggctctaagcaaagcaactaagagtaggagaaactgccaaaccctaaagtaggggaaagaaatctccaaacaacaagaggcactgtgaccaattcacataagactatcactaagacatcaggttttaacttgtaacttgcttttttccttgttagtggtatgttaaacaatggtatatcatgctatttgtgtatactggattcaatgaaatactataataaacaagtaagcaaaacataagatcataacacgtcctgaaaggacctctcagcaagagtgacacattgccaagtaatgcacattgttccacatggagttggtgaggataacagcacttccttccagaaatactttagtatacaaagtgctgtcacgtgatgacgtctcatttcagcatctcaacaaccgcacctggaaggccttattattttgtatatttacggatgaagagactggatctcaaatagcttaagagacttccctaacataactcagctaatgcctggaagacccaaaactagaatccagggctcctgactctacatcctatgtttttcttctcggctacatgaaatggtacaaaatacgaattaaatgattatccatggtcttgtgtaattctggcatgtttccagctaagacttctcagctgttcattcaactcaaaggcatccttcagtcctcttccccattcttctctgtctcggggatctgcctggggagggagtgtggtgaaagcagagtaactgaatcctcactaaccccaaggccctaacgcaaggagatgcaggcaataaatcattccattgcatttaccattgcattgcatttaccattgcattgcatttacccatacgtggggctctccagggatggcatcagatgctgcaggaacatgaatgataaataccacatcccaagggttagggcccaggcaagttctcaggggagagctatacatatgactggtaaaacccactatgtccagaagacaagggcaccctgctggtttgcatgagcaaagctaaattggcgctgacaactggcaataggtattgagagtctttttaaaagttgatgtcacttaatctagtaatcccatttccaggaattcattcaaagagaattaatctgggatatagagaaaggtctatgaataagattgcatcacagtgtggtttacatttggaaaaaactgtggttgtaacttaagttacaacagtagagggttgttcaaatattataattctggtacaaccacacgttaggattctctcttgccaattattgatgtcgtgggggagtgttcaagacaaaacattgagttataaaatcaggattctaaattatatatatacacacacatacacacaattaaactcaaacatacacatggagacacacacagcattttaaaacctagaaggaaatcacaaccataatacaatagttatctctgattatgggaatacaggtaattttggtgattttctctatgttttcttttttttctttttcttttttttttttgagacggagtctcaatctgttgccccaggctggagtgcaatggcatgatctcagctcactgcaacctccttctcccaggttcaagcgattctcctgcctcagcctccccagtagctgagactacaggcatgagccaccaagcctgactaatttttgtatttttagtagagatggggttttaccatgtttgccaggctggtctcgaactcctgacgtcaggtcatccacctgcctcggcctaccaaagtgttgttgggattacaggcatgagccactgcacctggctgtttttctctaagttttctacaatgttttattttgctttttaagacagaaagtccacgcaaatcagtcaggaatagatgtgaaaaatggggatggggcctttgaaccaggagcaatatgagaaggtgagaaggatggcctgggccggctgggtctgcgagactacctggaaaagccacgggaatcacagcccacagggtgacatctccagatccagcagtcttttaggaaggcagatggagtctcagacctgtcccacccatcttaaagtggcctggtcacagggtcagagcttcagcagacagaggcgccctgggataagttgccaaatatgggttgagcaacagtggcactggaacgaggtaggaggcggggaaaggggatggaaggtaaaatcctgcccctgtcctcaaggtacttacagtcaatgtgaggaaggctgacagccataaaatgatgacctatgacaacgagggtcgttccacacacatcctccagaccccggcacaagacctccgcctttcatctccattatattgggcaaaacacaaagcatcaacgaaaaaaaaaaaaaagtaaaagtacatagaaaaggagacacagaggaatacagaaaagcaaaaacctccttcaaactggtggatgtttcatcccaaaggacgctcgacctttctcaggcatcctgccactgaagaagtcaattactcacggcccacagtccctaggttccgctcagcacagtctggaatcaagggttcatttaatggaagcttaacagattcagatttctctaatattccacatccccttctgccaagaagctgctttgaaagatgacactcccttgatgtgaatttgcagcctgccccattaacaaggcttcagtcagaaaacatttttaaatcaaccctgttccagacacttgctcccaaggacaaactagaagaaactctgcaccagctcaaaccttccaagcactttgatgatcagaaatgaagggaaatattagaacaaatcttattaatccaaatattctcaacaatcttcaaagcaaaccgttgctctgggctgcagaaagcagagctcatgcagagccggccctttctgtcctaactcctgttagccaagccagccccctaaaaacagacctcagaacagcagagggaaatattcagaatcaaaggtgatgggaggaaaaaggaagaggaaacaggtaaatgaaagaaggaggatgaggattggaaagctgactacttaaacttttagcacgtccctcaaataaaaggataaggtgttgtatgccacactgcctcaaagcaactccctcagttcacagttgtgcagctgagaattctggagaaaccccacggcagctggcatctatgtcctggctccactcacaaggggctgagaaccccaggactcctcaccatgcacatttctcttgggtgtggtgggaggagcatttccgtttccaaacctcggggccatttgctcttagatacacaaacatctccccagcctttgccaagttcacccagccagaaggccataatgcagaattagtagcatttcaatcatttccgtgacgagctggtgacaggctggaatatgatgagtgaagcaatcagatgttgttacaggaaagaggcatgagaagagaatgacaacagagtggtacagtaataagcatcatcgtaaaagcccccactggcatcaagtttatcatcgccagcataactaaaggagccagaacacctgtttgtaatggggattccagctcctccactttctagctgtgtggctgagcacgcttctcgccctttctaagtcttggctgagcatctgtggaaggtggatagcaatcgctacttcataagattgtttagtgattaaagtcaaacaatgtctataaggcatttgcaaagcattagcagtaccagtagtaccagtagtagtagaagtagtagtagtatttggtattataaggagtattttatattatttcaaataggattatgcactatttcattatacccttatctcatatagaagacatttttaatgctatttgattgaaagtagaccagagactcagaaaggttaaacctctttcctagtaagtataaaaagttaatgcaggccaggtgcagtggctcacgtctggaatcccaacactttgggaggccaaggcgggaggatcacctgaggtcaggagtttgagaccagcctggcaaacatggcaaaaccccatctccagtaaaaatacaaaaattagccaggcatggtggtgcacacctgtaatcccagctacttcggaggctgaggcaggagaacagcctgaacccaggaggcagaggttgtggtgagccaagatggtgccacagcactccagcctggacgacagagtgacactccatctcaaaaaaagttaatgcagaaataaggctgcatatcggtttcctattgcttctgttaacaaattactacaaatttaattagttaaattgacactatcttacagttctggagtcaaaagtcctaaaattaaggtgtcaacagaactgtgtttcttctggagactctgaggacagaatccgtttcctcacctttttcagcttctagaggccacctacgttccttggcttgtggctccttcctatatctttaaagccagcagcatagcatcttccagtttctctctctgattctaagcctcttgcctctttcttataagaacccttgtgattacattgggcccattcaaagaaacaaggataatctccccctctcaagatccttaccttaatcacatctgcaaagtcccttttccatataaggtaacatattctaggttctggggattcagatgtggacaaatttggaggtggtcattattcagcctaccataaactggatcctgttctgcagaacatagctatttggagcaagaatgggagttttgtttgctttgctttaaactctttcatttctttactcagcaaataccatagagcagctactatgtgcagggcacattcataactcataacctcctcctctctggatataaccacatcagaatcgagcttcattagtgtgatataaaagaggtctttgcatatacacacacatatatatatatatatatatctcaaaatatcaccaaaacccatactttaaaaaacaaaaagggcctttggagatcatcagccaatccccttattctataaaggggcagaggagtaatacaactatcccagtgtcaaatagggagtttgtgagacataatgagggcctgaattagatctggaggaaaaaaagtaaatggaggtatttttgagaaaaatcagtgagctgaacggcaatagggtaggagaaatgtaggggtcaagggtgcctaaagttcatggcttggggatgtcactcacagagctggggacagatagaggaaagacacttttgagggaaaatatgtattcagtgtgttctagaactcggatctcttcttagtgtcactgtgaaattttccattacttcatctcacttcctgttctctcataagcgcgaacacggggctgtaatcatcgtctgaccaccacatgttagtgcactgtgtttcttgctgacacctggctaggctttgaggatgagtttccatcccaacatctaccaacatacaaggagcccaaggcaatgggattttctgcgcatctttgcttgaaccttaaaggtgctgccccattgtcttctggtaggcctcgtttctgggaagacgtctattgaattcttatctttgtcactgagtatgcagtttgactttttacctctagcttctttttttttttttttttttttttttggtcactggttttcagcaatttgattattctgtggcttggtgtagtttccctcatattttttgtgttttgagatcattgatcatcttggatctatgtatttagtgctttcatcaaacgtagatatttttccaccattattatttctttaagcatttcttctgtcccctttcttgtctcctttggaattttcaattacatatatatgaggcctcttaaaattgcccgacagctccctgatgttctgttaatttattttcagcctttattctctgtgtttcaaatggatggtttctgttgctgtgaattcaagtccactaatcttttcttctgcaatgtgtaatctgttattcatcccacctaatgtatttcatatctcagacattgatttttgaatctctagaagttcagtttagacttcttatatctcccatatttcttcttagcatgcttacattttcttctaccatcttgaataaatgaaatatagttataagaactgttttaatgttcttgtggactaattttaccatctataacaattctaggttggttttgattgattgatttttctcttcattatgggttgtattttcctgcttctttgcatgcctggtaatttttgactagataccggacattgtgaattttacctaattggtgctgggtattcctacattattttaaatgttcttcagctttgtcctggggtgcagttaaattacttggaaatagtttgacccttttgagacttgctttaaaactttgttagatgggaccagaacagcctttagtctagggcaaatttgccccttgaatccaaacactgtttatgttgttaatgatgacaaaatatccatgtcccacactattccttactaagtctcccttcaacaattgtgtttgagtagaactgttaactgcctcacctcactctcctgtgtattcacaaggcaaagatccccaaggttttgaccaatacccaatgttgttttggtgccagcttgcacagcaccagggctcttgcctctcagagagaattgtgccccctctctccactatgtggcacagcacattgagctcaacaacgttctatcagactgatgttgccataacactgcatatcttcacccaggaggggcgacagccctaagtctcttatgtggcaaaataaaatccaactttcagtgctaaaaaggccctgcttttctggagcgaaccccttcagaggtctcacaagcatttaaaagagaatttctagaccacaagtttcagtgtggagagctgcaggcttagagaattgcagggatgtttgaagccctgcccacagttccaggaaacaccctttgtatatgagctcctttcccacacaaatgtgagaaggaggctatgaccctggaaattgaacacagggcaacagaaaccctgccgaaactattcttgcattgacattagacacaaaaacacccatataagcttgatttgctgtcacagtcaaataaaacaataacatgtaagcatttcaaagagattccactgacattctcacttgtgattctgacaacaagcgtgtaagtaagaaaggcaggcgtcacagctcctaagtgacagacgaggaaatcagccttgcggaggttaaatgatctcaacaaggtcagacagctagttggtgcaaagtggggccctgaacccagatcttctgactcttggtcaagagctctattcattccgctgtgtctgctctcttactatatcagaaaagggaacagccaccaacttcctgtgttgaccctagaccaggacttcttgatcacagcacacttaacatttggggctggataattctttgttgtgagaggctgtcctgtgcattgaagggtgttgagcagtatccctggcctctacccactaatgccagtagaactccccttgccccctgttttgacaaccaaaactatctccaggtgttgccatgtttccaaatgccccaaggtgggggaaggtaacagcagagcaaacttacccctcagttgaaaaccactgccctaaatgatgcctgagaatgctgtccacgtgtttgagaaagcagtggtgattaagttagttctgtgaaaggagaaacaaaatcaaaagaggaacttgtgctgataccagtgagtctgggaccacgaaacttggccgtgagagacagaattgtgcagcaccagggagttatctaaaaagttctcttctgggccaccctctgaacttaaccttctgtgttctcgctccactccttcaggctcagtcagctctgcaaaacccaatccactttccaaggaaacatttctggaaggcaacacggaattagttaatgtgatgagaggcagaacagagcagttaagatgcaggctctgcacataccacaacgtggatgaatctcacttaatgttgggtgagaagagccaggcccaaaagagcatctattgtgtgaatctactaactcgaagttcaagagcaggcaaaactaatctccggtgatggaagtctgaacagttacatctgctggtggtgttgcctggagacacgtttcagagaatagaaatgttctctgccttgatggtggtggtggttacggtggttgtaaacataatagacactcacaacactcacagagctatacacttacgattcgtcacctaaaaaaaaaaagaaagaaaaagaaaagaaaagaatgttgactctagaaccaaattgtctaagtttcatccctgacgatgactctggttaccttagagcattttgtgaaaagttaataaactacacagggtatacaggaagtgcacaataagtatttgcatcattataattaacagaactacacttcagccaagcgcagtggctcacgcctgtaatcccagaacttcaggaggccgaggcaggcagatcacgaggtcaggagatcgagaccatcctggctaatatggtgaaaccctttctctactaaaaatacaaaaaaaaattagccgagcgtggtggcaggtgcctgtagtcccagctactcgggaggccaaagcaggagaatggcgtgaacccgggaggcggagcttgcagtgagccgagattgtgccactgcactccagcctgggtgacacagagagactctgtctcaaaaaaaaaaaaaagaaaaaaaagaactacacttctagccagtcaggcaaagccaaggattaagagagttactctgaatttctctgctgccccctctgcctcacctcccatgcattgaacacagagtgtatatgtaagtcctcccaccccaaccatcaagacaggcacatctgccatttttctctgtcttcttcagttccttccaggttctctctgccttgcttaggagctgcccctgtttgcagagctcttcatcaatagactgaatatttacagaatagcgcagttttgattaaacagttcatttcactggagactggggtggtgtattgtgtctcctccggagttattcttggcatcagcagcccttgctcttagcatccgtttctttacattttaaggtggagcataagaagaactgcagtgaaacagatcagatggggggcaggtgggatttctctttacctttcccccgctatttcttggtggatttatcccgttatcttcgctgctatttgctccttgctatcttttattcttctcttttgaaactggccgagtcagaaggaaataaacaaatgcaagggtgcgtagaaagagcattagatggtaggtccagaaacttggactctacatccagcatctagtgatgtgattgattgatatctgttttagcttttcggcacctcaggttttgggctgttttttttttgttttttttttaatctgttaattgaagtgattggtctagatttgtggtctttgaatgtgtgtcagccatggaaaccttcctacaaacagaatctcaagcagcaaatgttaaaacctaaaagcaattttgtttgggttgaaacaaggtgggcgggcagtcaggaacccacccttttaacttctgtgtcctctgccatctcctgtagcagcccccaaagtagttccacaagatccttggccttgggatgctagagcacaacgtctaaaccattcgatgtgcctatttagaaactcatttcctgctcttaaagcgctcagccctctcccctacacataaagccttgcctccatgaaagcagggaggactagccttcgaaaccccagcacacagaggtgagtgtgagcacagctcaacagtatacaagcccgctggaaagctgccccagacagaatttcctcagttgcatcctatggactatcagtcccagaaacgcttggccaaaaaaggaaatacggagggcgggggcagcttgcttcaaagtaattgaggttgagagccgctgtataccatctgccccttctagagattaaattcacagtagcttcttctctcgggccagcaggaagcctgattaatgccgcttaatacgacacttcccatatttatttggccacaaaactcctttttccccataactcctattaatatcacaggaaacagtttgagatcagaaaagccttcacaaaggcaatttttaaagactgagttataaggctcaaaataaatgaggaattctagaaaaggaagggaggagggagaaggacactggtttggggtctggagggctttaagatgagggcgaaacaaggaccacccatgattccaaagaatatccggaacttgcttgttgtctgttggtgcctttctttcagctcattcctagagggcggacagaggcaggagttgctgtgttgctggccagtggctcctgaccataggaaggggactgtgggtgtgagaagtaaagcagagcaggcccctgcctctgttctccccttccccctggtattggctcaccgtgacaaatctttccctaggaagggcagaaaatgaattatcctgttaaatcaattcagcagataacccacctctgtgcaggccttgtgctgggaccacacagatgcataagacacgtacagcttagagcctagtcatgaaatgggaaataaacagccccatcctcaaggtctgaacaggggattggggagcacagagaagggccccaccccgaccagctgtcaagagaactatccatacattctaattcctccaaggttgagggctaaggtgtaggaagaggagagaggttccaagcagaaggaattgcagaagcaaaggcacagaggcatccgggacctgcgagcagctatggctggagccgcgtgtcgcaggatggagagcgtgtgaacagaggggactggaagcggatcctcccaggaagcagttgcaggcggtcatgctacagtgagttgctgatagtaggaggggaagaaagaggaagggggagtggaagatgactcagtggggggtgagccagtgcctggaagagaggaatgtgtgagcagaatgaggaagttagcaaaagctggttgaaggtaggaggtggaaagacaagttcagccctcaacaagttaagcaggttatataagaagtccaggcatggatgacgatgatcataatcatgatggggaggatgacaaagatgactaggaacgctctgtcatctctctctctctctctctctctctttccttcctggttgtgtgagtttgcagggagacgggaggttgtgaagaacaataaccagaagagagtttgcgtcttcatcagaaagcacctggggcaggtagagttggtgctagcttctccatccatccctgacaccccagccccattcatcattcagcagaagacaggctgggctggcccaacttggtcctgtacccccaccaccccagaaccccactggtccatagtgaggatcccttctctttgactctcctccttctctgtgactcgcctaagcctgatcctacaccttctctcccagccactgcctcagcttcctccacccccagcttgggacgagccacctccctggctgggtagcatgggacaagccatctccctgcagaggcagagaaccagtgacactacacgcaaaccaaggccatgctgcaaacagaacaccaaggcaccctcgtcttaggatgcattatattcggggtagatgttgaattctagtaacacattccctggggtgttttcaaatccagacacactggagccttgttccagcctcactgtgggcgaaggccccgggctcacctccagcctcaggctggctctggctgctgcccctgttccatcctggcaagcggaactgaacaggcccgactccacagcccccggtgctgccagctgcaagctctgctgactccaacctcaggcccctgcgtgcctgcttctaaatccacacgttcctgctccttcctgcccctgctgccctctcagaatgccacttctttctgccaagacctcaggcattgctatggcccagccccatctttattgatgtcggggctctgtccccttgcagagcccatcccattgccacccacatctgggacagcaaaagacttctcagtttcctccagagttcagtttcttccaaaaagctcggcacatcttagctgccagtgtgaactgtgagctcccagagatgcccgtggcactttccaacattcgtcacttttgacacatctaaaatatcctagctcccagagctgcgtgagcaccagcccagatggaccggctgctggggaagcatcagtctctccagggcctctgtgaagccctggggcagtagggggatgtctgacaaagcttcctaactgaggagccccacttcctctcgctctgggcacccctgccaaatgagcgggcacctctatgttccagcagccctcgctgcccagcttctgagctgcaagccagcttccttccacagaattctctgcaccttggcttccggtggctccaagcactttgccatctgccgagtcagttctgccagagatgaagcagctgatgtggggagttctctgtgggggccacctttcctctctcaggtcacctttactctcagaaggaaactgaccccctgacctattaaatagctgaaatcaagggccactaggacccaagtcggtgaaggtgcaactgaaggcaagaaggtcagcatctagctagacagacacgtaagccaagaagacagacgaggtgagtggaccctttgactccacagtcagacagcaagagagctactcccagagttctctggggcatgaaggggctgcaggggtaggtgaacagcatccagagaaatagttatcatggaaagtgcaagcaggaaacaagctgggattttttttttatttaaaattatttttcaggccaggcacagaggctcacgcctataatcccaacactttgggagcccgaggcaggaggatcacttgaggccaggagtttgagaccagcctgagcaacacagtgaggccctgtgtctatgataaataaataaataaataaattagctagtggagcagggctggtggcatgtgcctgcgatcccagctacttgagaagctgaggagggaggatcgcttgagcccaagaggtcaaggctgcagtgagctacgatcactacactccagcccaggcaacagagccagaacttgtctctaaaaatacaaagaaataaaagaaaagaaattcttttaaggaagtaaatactaacatggctcagaaattaaaagaatgtaaaatagaatagatttgcaaaatctcacccccatcccacgatgtccatatccattccctcctccccctttcccaccatgggtaaccacttatattcatctcatctgtatcgttccaacataaccttacgcagctgaaagccaacatggagttatttacttatgcccccacccttccacaaaagtatcacactttagatactgttctgcaccttactttggcaactcagcagtacattctagaaatcttttcaaatcagtacagagtgtttctttagtcaagctgcaaagtattccattgagggatatgtccccgttcagttatctagacactagatggacacttgggatgtttccagtattttacaattacagacaatcctgcaatgaatgaccttgcattaatttcatttcgtaagtgtgcagatatagccacagggtagagtcccatgcaggaaatgctgagtaaagagaaaatgcatttgtaactttcatagctgttgccaaatccctctccattggagttgcaccattttgcattcctgccagtgtctccatcaaggtgtgtggtcacactttttaatgtttaccaatctgatggttgagacttgtgtctcagtatatatttactttgtatttttcatcttaggagtgaggttgaggatcttttcatatgtcaaagggccattcatattcctttttctgtgaaacggctcctcatgtccttggttggcccattttttgttctgtgggttgctgtccttggtctccttgatttctaggcattctatagatatcggggatattcgccctttgtgttatgagttgcaattattttttctcactttattgttcattttttgcctctgcttatggtctttttttaatttagttggtcatacagaagttttttgtttgctttaatgtagtctaatttaacaatcttttacagcttctgaattttgaatcacagagggagattcttattcaaaaggttatcaaggaattagcccatattttttttctggtcattttatgattcctgttatttcatttaaaaattggatccatttggagtttttcctgatgtatgatgagaggtatggaccaaacttataacttttcatctttttccagatctcccaatactattttttaaagtccatctttaccccagcactttgagaaattagatttccactgcccagaacaacctggccaatttgagaagtcacttctatcaaatactgaatgcaaacatatgcatttgagtgttctgggtttctattctgcttctttatccaagctcctgtatacacagcttgaattactgaatctttacggtacgtgttagtatgaaataggacaaatcttcccccatagtcctttttagttcagagctcccctggccatttactggcaagctgagctctgtcactggggctctccttgctcactgtcatgttttattctcttctctcctacaaggaggccaatatatgcctgcaggcatccaaccagggaaagaggcaagcacagcccactccccaaacaaggcagaggcaggggtgcaaggccttctgggagagtcccagtaggccatgtctatgtacccctttgaggccggtgttctggggaaaggccaaataggagacctatgtcttcctggaggtttggactttgccctgaagattctcagcactgatcttctggtccatccaatctgtttaaatgagggtgatcccagataacctcaacataaagagttatcctgtctgatattctgtctcctcatgatctgttactgatcaggtgcagaagaacccttcaaggaggaagatgttacaatagcaatatcaatgcctacttctactaccaccaatgccaccagggccacctttattcattgagaacctgctatataccaggcattgtgggaggtactttacacgtttatctcattcacttacaaccccatgaggaaaccatctgtaaacgtgcccagaattgtggctcattagcggcagagccaagctttggatcccagcctggttccaaaactcatactcttcaccactgggcaacttcttctcagaatgatctgccaccctgggatgatgcaaattcccaggcctcccagacctactgaatcagctgctctgggaatggcacccaggagtctgcatctccagcacatgaatacatgagaaccactgctcacaaatgtaaaaagttaggtaatatatcagggaggctgtgaggatgagtgtttccttagcagtggtgtaagggcagaaccctggctggagtgttttgcagtcagactgatttcctcattagcagagagtgttaaccggtagcctagtttggctcctcgaggtgcctgattcagacagagcatcccacagctggagcaccctagctggtggaggtagggactcagccaagtaggctccagagctgccacctaagcccagtagatttctcttgcccagaacaacctggccaaatggaagatgggaggctgaaatcctcactccaaggaggggcctccttttcttggcacaaaggcaccgcgccaagctacacagctaaggcagtgtgctacctaaagcaggtgcacagaattcacagagaggtaccaaataggctggcaaagaccttggtggataagtacccacaaatatctggaaggaactatgttgggttgagacatgagaaggaagagatcttaggcaagtttggaaagggaaacaacacattgaatgccaacccctggactagatatttcatcaacttcgttcatcctcactaccacccacacaagacggtcttcctatttccaacttagaagaaggaagttgaggctcctactggttaagcaagcttcccaaggccatacagctaataagtgttaaacaatcaaacacagaactgactggctccaaagccagtgcccgccccactggccactccactaccctgcctctgccattgctccctatggcaacctggaaactgtcgggtacctgcccgtggtctgaagtgggcaggcagcagtcagctgggcctccagatatgggtggtgaagggaggatacaggtccaaaagaatatcttaggggaaatagtgcacatgcccagaaaacttttatagtctcagaacttagatgtgcggagaaatcgaattctggtcctggtttgcttttttagccagttgtgggccttggcagtcactgaacccctccttatttcttcatgaggaaattaacatgcctaggataggaaccgctgtgctgcagaccccagggtcaggcaagtctcaaagaagatgagagtcaccaagcgcctcaggaaagctgaagggcacagggtgcatgctgcagccatgacctcaacctctgtgagtctagaggtgaccatattggccacacataagctcaccttccccctacatttcataatccttccctcccatcagggccagcctttgattaaaattcccaagattatctgaggagctggcggtaccacccaccaatggagttcatctggctgcctttacaccagccaccttatggctgggtgggcactttcctattcttcggccaacacaacactttccaaactgtgtgacagttgtttatttacttgcctctaccataagaccatgagctttttgaaagcatggtctgtcttattcactgttaggtatcacagtgtattcacaatccctgacacatagtaggtgcttaataaatgtgtggttgaatgaataaatgaattaatgaatgaatgaatgaatgaatgggatcagggtgggccttcagtctctaaaagcatacccaagagccagccctctcagccgcaggtccgcacatggggaagccctagggaggttcaaggactagatcaggcccattttctcatcaggcagcccccaaacctctgccccaaagagcacatccaacatgctttcagcccacactccccacccacggtttactgcctgtaatcccagctactcgggaggccgaggcaggagaatcgcttgaactcgagaggcagaggttgcagtgagccgagaccaccccattgcactccagcctgagtgacaagagcaaaactctgtctcaaaaaaaaaaaaaaaagaataaccttgggctgtttggccaagttaatgcttaatgctttcctcatgctgcaagcgtttatctttgcccagattccagctccagggaggggaacattcctgcagaacagccaggcgttcccaggtcacctctgctctcactctcacttttctttttgcatgattaaatccggcctaaaaacacgtctcaggggcacatatctgtcactcataataatcctataaggtaggtactactgttagtcttattatatagttgagacacagagaggttaaataactagcccaaggtcacacagttaataagtagcagagctgggatttaagccaggcaatctggctccagagctcggtgcctttttttttctttgacagggtttggctctgtcacctgagctggagtgcagtggcacaatcactgctcactgcagtctcgacctcgctcaggtgatcctcccacctcaacctcccaagtagctgggactacaggcacgcaccaccatacccagctagagcccaagctcctaaccgcttctgctgtgcagtaacaagccacgctcagggcatgggcccaacttgagtttcttccatccacgggtccagactggaaaggaagcagcaatcttctcttcttttctcactgagtataaggcacccaattcatcttctggcagctgacctggaggacggagtggccctgattttccttttacaggtacaatcactgccaatactaaagcagtgcctgtccctacctgccagggcacccaggatccttgtctccagcagtaacttcatgaggtaggtggctctgggctgagacaggacttgcatattcctagatcccttgactgtgatgtcgaaggtcctctgcccccacccctccttctattccttgtaagcttcacttggcaattgtgtagtttatgtctggtacaggaatgaaggataaggtcaaatgaagctcaaagccaggagctagatagtcatgatatatcaaataaagttttggaacaagaacacaatgggattaatttgccaatcaaaacagcgcttggcaacttgactgtaagccaagatctctcatggcaagagcagctgaagggcctgtgattgtccagctcctggggagcctccctggcctaaccgtggtcagatgccagcatcacagcccccttagctgggtaaggattctcctagtgctacctctgggagagaaagaaaaaaatctagtctgagaatgacaccagcagacagcagctctgccaggtgtttgaagggtgaaggtcatgggactctgtttttactaccctggtcaccccaattgtttcggggtattttccatagacaagaggatgccccagtcagctgtcttccgtgattcaagacccagtctactgtcttctgtgattcaagacctgtttcctcttgtgccgatcagaggccttatttggaggcatcggcctttatgtggcatggaatgtaagccctctgagctttaacagagataggaagagtcctagaacatggcagggaagagggtcggaacctctgtcctccagcacagtagaaggatgctggcttgaatgtcaggagagcccagagtttctacctggatgcatggtttggggcatgtcaggtggcctttctgggtcccagtttcttcaactgtgacataaggaaggtagactagatcatcactaccaataaaaggtccctggtccttggggagcagtggttggagtgggagaagggcatcgcccagctattttccaacacatcgtaaaagatatcgcacaggacaactgaatgttgacttggtttgcttacctgtggaattctatccacttggtgtggtaaaacggattctcgccagagaactggaagtgtagatgggtggtgttacctatatccttgattgataagagaaggaaaatgaatttttcctcaataagtacaggttgtttgaaatgcaggctgggtgcagcgacgctgcatggtctccaggcgccttgtgtttctaaccctcttgctggacaacttggcctccacagggtagtccccagggaacccttggccatctccggcctgaaggaatcagggaagaccttccggacatgccaagtctccctgagaccctgctccatgagggctggctccctccccgacctggtcttttggttcaaagtcagtcctggagttatgtctgccaattgaccccaacctccagaaaactcagaaacagcctgtcctctcaggcctgcaaaccaggagcagccaggcccagccctgacttatgcaagtaactaccacagaaggcctgctgtgcagcctatgccgctcaacctggatcaagggcaatgtggagaaaccacattattgcttgactatagtgcagtattccaacaatcattttaaatgtgcacttgtgtaaccatgatcaccatcaagatgtaggatatttccatctctctttagagattcccttttgccctttgctagttaatccccaccccattccctggacccaggaaatcactgatctgctctcaatcacaatagctttgcttttccagaacgtcctgtaaatggaatcacacagtttgtacccttttaaatctagcttctttcacttagctttatgcattttagatgtatccatgttctggcatgtgtcagcaattgttcctttttcctgctgagtagtattccattggatggatatgcgacaatttgtttatccatttaccagttgatagatatttgggttgtttcagatttggggttattatgaataaagctgccatgaacatttgaatatttatgtggacatatgtttccatttctcttgagtaaacgcttgaagtttactgggtcctatagtaagtgtacatttgcctttaaagaacttgtcaaacggttttccaaagaaagtattttttgttctcaccagcaatctatgaggagttctacccggttttgtcagtctttttaattttagccattctaaagggagagaagtgatattccgttgtgttttaaatttgcatttctcccatgactaatgatgttaagcacattttcttgtacacatgtgccctttgtgtatcttcttttaaggatatctgttcagttctctcaccctaccttgaacctacacagggtggaatgtgcctatgacctcggaaggactttagggaagcaagccccactttccccagagaggattccagtacaaacggaaagctcttctgaatggcatactctttcataaccagatttcttaaaagaaaaaaatcattctgattctagcctgaagtgcagtagaattcaagagaatttaagagaaaagtttagaaggaaaaaatttttggcaagaaaaaagactctacttacttttttccctgggatccacaaaagaagaagttgtggcctcaggctacagtagtatggagccaaaatggactcaaaaaaaaaaaaaaaaaaccccagaataaatcagacatgaaaataactttccttccatcccgtatctcattttcttatttgacaaaaaaatagtaaagagcaactacaacaacaaagaagaggtgaaacaagaatgcaaaaaatgatgggaagatggcaacctccaaaatgtaataaattaatttcagcagctttaaacctaaagctatttgtaaagaatagctagaaaagaaacccactcaagacaaacttaggaatttcttctgagttcaaaacaatatcttaatgacctgaaaaattaccacggctttacaaagcacctcattcactccttaggagtgaattataccttgggtaattgaggttcgacattatagtgaagtgatgctagggtgtcacaagaggtgaaggacaatacaaagtttagtaactattgtgcacattcagaaattgagacacagaattactttcaagaaaaaagtaaatgggagggtcaggtgtccaggtcagggcaaaattcaagatggtgggagtgggagaaacattcctcaccatggccttgggcagaatctgcttatctccagacaaagctcagcaacagctaggagctgaatctgtaaggtccagcagtgactaaattcccacacaaatgtttccatctttccatcgtgcaagaaattctgaagccaacattgcccagctacagatcattggcctgaccacagaagccagggacagagctgcggttacatttattacataggattgttccatcctgagcagagtacatggcctggagagttttcagggcaattatgaaatttcggtcttccagaggacccttgccaggtctaggaatattttcagcagtggatgtttacaaagcaaaagcccccctacacacacattagcaaattaaataatgcatgttgtatgaaaaaccttgtgaggggcatagcaatacccgaggcttctttcttatgcacttgtgtgcccagtaccagccaatacatggaaagggctcaacaaacactgaactgagcaacagcttctagcccaggcatcatgggcgggaggcagatcctgactccaatcgggcctcctatggtagaatccctggttctctcccatggaaggtgccccacctcaattgcctgcagtcacccatctgctgatgtccttacccaaaagaaaatgaaataatttcttcttgtatgaaatatcaggaaccctcaaacctaggagttaactaggaatagaaaaatcacttgctgtaagaaataatattagaaatgtaatggctggacccagcttctccttctaactaattttaaggattgttttgctgctctaggaacttactgtcatacagaggacaaccccaagcctccctagtccatcaaccccttttcctggatacaggggctgaatcccttgatggatttgatcacttacctcaatttaatattcctcctcctaaaaccacagtatcatccccagattcttatcactggtgtgactacctcttctgaagacatgagaaaagctccagtttcagaaggtatgcttggagaatgtgctgcttctagcttatccaatatggaaccaatttcttcactcatagctaaagcatatcctttcctcacagcttatcatagagtggccaggtttaaatgagtcaatacaaataagactgctggaaaagtgcctggcacagagaaagcattcaatatatatcagcttttaaaaatgctgaagatcaatttgaatatatatgtatatataaagagatataaataggatcacacgtaaggaactgattctacttttaggaaactacactaagaaaatactaatagattccgataaatatttatacataaagaatatcatcagagaattgtttgtaatagggcaaataaaaccttgaaacagcatacattttcaacaatagtggaataagtaaataaattacggcactttttccaagtacgttttgaagaatttttgatgctatgagaaaatgataatgataagtgaagaaggatttaaaaccatttatgtaacatgatctcaattatacacactgtaaataagaatctatggaacaaatatctccataagaaaacattatgaagatatactccaaatgttatttgtgtttttttctaaataataatattctttattttttcagcacttttcaaattatactgaaatatattttcagcatacatacaatgagcatcccttaattctacaaaaagcaaaataaaatatgaaacagttaaaagtctattgcaacactataatttgaaggggaaaaaaaaggctaaggacatacagtaggccactgggcagacaaaggagatcattctgagcctgagtcctcagtatttggtgacccagtagagaggcaagagagggcataagctctaagctttccaccttgggcatagagatgaatgacggtgttatgaaccacaataggaaacgtaggaagaaaggaagaagaatgggttgggaggaaggaaaatacatttagtttggccttgctgagtctgtagtgcccaaagagtacccaggcaaagatgcccagtcgagagctggtgatgtgcaaagctaaaacttgtaggaagaaactgcagtaaaggtatgagggtgggcacagcagtgagtccttgaagccacgggcttcccttaggatgcccaagtgtcctaagtgttctaggaataagcgacagactctgatctcatggaggctcagacccctgggcttcagggctctattccttccacccctaaatgtgacctgaagtggcccctgcctccctcagtcctagaggctgctgctcaattacagtgaagaatctcttatagactcacggtgacttaaacgctatttggtgctgtggctgctatttcactgaagattacagggctctcagagttaaccacataaaacttgctgctatatatttgtaacctcctttttcaataacacatagggaaaccatcttgggtttcaggaccaaaaaagtgtgagtgcctggccaccaggaatgctataactgatcccgcttccctctttgatgtggccaaaaagaagctcagaaaaaaatctgtggcccatcttcagcagccttataagatcacatagtgtacatttttgggtgttaatattgacattcctatctttattgttttactgcccttattttctctttgtcccaagttcttcaactatgaatttttgccaactacttcaagttaaaaatgttcttccatgtcatgcccacccagtgattctgtttgtttctacctcttgaagttacacaaaataagtctagtctaccttctccacaacagcccttcaactctcatgtcatcctcccaatcttatttttataggcaccagagccccactttctttaacaattgctcgtggatatgagctcttaaagagtctttcctccatctagacttgactgatgctttatcttctctcgacctcttccctaaagcccctacgcagggcattcctccgctgcaacacagcaaccacttttaatagttgcttttcaagcttgcatcccccaccccaccatggggctggggactcctgaaaggagccacatgctgtctttgcctccaactagtacctagccagggggcctggggcataatacatgcttaataagtgtttgttgaggaagtgaataaatgaatgagcacatacctgtatacagtatacagcttcctcgctcatacacatgttaaagagagctaaagcctccgggaagggagaaaagagagggccctgttcagtccagttgtttgtggggctttccatctgacaactgttttccatggtctctcctgaacagcctcgaagcctcagccacctgggctggagcgtatctcacagctaaatccagagtaaatatacacaagacagaattggtcctatgaggacaactggggtgaatttccacagaaagaaaggatttcactgatcagaaatgtaagatgctagatgctccaattggtacttattctaacaacgctctcttctctaggttctaattacatgtcaggcattgttctgagctctttacaaatatcttatttaatcctcctaacaacctcataagataggcactatttttatccccattttattttcatatgaccctcttaacatttgaggcagctatcctaaaatgaagaaaggtgtagtgtttcagtctctgaataaaagaaaatgagctacattaggtccaatgtataaatggctgaagattgagtgccagcctttgatccaagatctggatctggcaggacacctcaccgctcactaacatttattgagcacccaccattgtgcccagggctaccctccatgagttcgctgacaggtggaggaagcacacacctggataaataaatcaccccgctgcagggcaagtgtattaggatcagggaggcagtacggtgctgagagcaagaaggagtaattatctctgactagatgagaaggcttcctggaggctgtgaagtctcagttccattttaatgaatggagcagcagagacagagcaggaggtgaggtgcaaaggtaccggcatccaaaagggcatttgggaactgttggtagcaggagaacgaaaagagaggaggaggtgggggatgagggatcatcactcaggtggtggccttggctgcaataccatgaagctgaaagtcactaacaggtatagtcatttctgttttagactctttgagcagctgtgtgcaggaggacagagagaccaagcagagagagaccagttaggaggctgctgtaataaaccaagcaagacacagtgtgcacgggaactaaggcacaggattctagggatatttaggaaacctgaagctttggactgatcgagaagctggcatagcagtgcaaggtgacaccccggcttctgacttagacaggagggcagccagtgaaatcagcaggctaggttggaagcaggcttccaggagtgagggcaagctgagactctctataagctcagaaaagccaaagagagcggcagaaattttcttcattatctcagaaaagttattcaaattcttgctcacacctccttttaataaaatatgatgcatttcattctgtcttcatagtgaaaaatcattgccctttgctgagaattaataaccttttgagttaataccctttgggtaggaaaattggtttcattaacacctccccttgcactttgtaggttcatcatctcttggtcctgctgtcccctgaaaccaaaagcccaagacatattatttgagaagcctgaatgattttattctcagaaagaatgatcagggtccttattaaatgggctgaattgagttcactgaccaaaaaggtcagagcggccttgtgtctgctcctcagccgcaggggagcccaccttctaccagaaggaagggatgagagcttcctctcccagctcttggcctgatccctaatcttggcagaaaagatgcgcccatcttgacatgccacgccatggaaacgcgccaccttgccaggctctaccaggcctcttggcagaggtgtccgtctctggtgcagcaccacagacaggacagctgtcgggctgcctggcagagttggatggccactcacccacccctccaaagtggctcatggtcatagtgaggctcccccagaagagaggctggaaggcccttcggtcaaacaacagaaggtgatatgttaaaaacaatcttcctctccttttccacctcccacggccttggaaagcctccgaatggacattcctctactcttttctgttgcaaactctttagcagcagcctggcatctggagcatgaagccagactcttcagcatcccagggcccttcatgctctggcctgcctggccttgtctcctgcctctttatgtatgcaaggttgcatgcctgtgagcctcgactcatgttgctccctcagccacccctgacccccgcaacaaaacacacacacacactcaatcatcctgcaaggccagggtcaacatcacattccctgaaaagccctccctgaatgccacaccctccctcaagcggcatccactactccctctgtgattcccccaaccctgccccacactcacccctgtaccttgtccctgcaaggcttacctgatataatctgtctgcacgtgaggacaagttgagcctcaggagctaatacatagtgtcacccagctaagatgctctattcactgtctctctaggtagggatgtagggatgaaattggagacagcgacacctgggttcaaatcctgtctctatcagtttttggcagtgtgatttggggtgaggtgcttatccaccgagcctccaaaactgccttgcctatattccttatgacctagagggtgactctagtgcttgattggctggtcactgggataacaggctagaggatctggtgatctcaacctcctaggccaccctccatcacttggccattccactggaaacagtctttggggctccccacagttgtggctcattctgatctccagcatctcccagtaacctctttggcttgtgcttgtagaagcagcctttgagaagacggagggcttcagatgaagcagatgccaggctaagcaccgtccccaatcttatattgcagagccatttggaagaagagctcaagctgttgaaacaaacaaaacgctgcatgagatgaagaccagattcctgctctttggagaaaccaatcagggctgtcagattcgaatcaatcatccggacacgttacaggagtgcggcttcaactcctccctgcctctggtgatgataatccacgggtggtcggtaggaaatgctgacatgccgtttttctctccgatttcacattttctttttttctttctagcgtgttcatgttcataaaaagatagggagctggtgataacaactccatgcataatgtttatgaagcacgttctaattttccaagtgcttccccacgcattagctcattgattatctcgattccatgagtaagcagcgtgagaaaatataattatctccatgtttcagatagaatgtggctcaaagaggccacacagcccattggggcccacaagggattgcagtccgtgcaggaagaagcctccttcctgaatctgcatgttacacacagggggacataggaagccagaagaatggactcccaatgaaatgttgtatcagcaaggtttaagttcagcagcaaataacagagactcaaattagcagtggttcaaagaaaacagaaatttgttttcatttcgcaaaatattccaaagatatatgtaacccaaaaaccggctagacagctttggtcagtgaagtcctccaggccccagctccttccagttcactgctctgccatcttggggtgtgaccctcatcctcatagtccaagatggcagctagaggactagccatcacatctttattccaggaagcacaatgtagtaaaagatgtacacaaaggagtcaaaagcaaggtttttacaagagctttattgagatataatttacaaagcgtacaacttatccatttcaagtttacacaattcaatggcttttggtataaaagagtgttttttaggtgtcccagagcctctgtgaaattctcccagttacatccattgaccatatctaagtggaaaggtggctgagaagtataggctgttaaagaaaatgtagccttttagtgatgctaaaaattctattactatggaagaaggagagaaaggatattattggcaatagatgaagtcaaaccatgtgagaacttgtctccaagaggaaatcctgcctccccagtgtctagcccacccatgatttcaagcatagttcacaatttgaaccctccagagattttggtgtctacttcatgacttagaaacctttccctgccatctagttgaaaagtactcttgaaacccccatctatcctatcctggagaggaaaatgaacccttccatcacctgcctcccctcacctctccctgcctcccacatgacgttccagcaacatctaactgcttgtattaatagcttcctccacaccccatgcacctgccttctctcttcttggtcttggcttagtctgtgccctctgcctagagtgttctttctcctcctcttttcctgattaactcccacttttcctgtaagacacagtcccaaacaggtcctcctgcaagccattgctgccttcatcccagcactcccacagggcattcagtgtcaccgggagttcccgtgtggccctgagcactctccaccactgctctgcagctcggctttctaattgtctgtgtttctctgctctgctaggccgtaagcttctccctgggaaggattctgtcctattctcatctaatagactactgtgggccactatccattatgtaatcagtgctccaaaatgtttgttaactgaattaaagatcaaatgaatgagtcttgtttataaatgcaacatgaggaccacaggagcctcttaccaggatgcttttaccaaaatgcactcttcattatcaaaattctgtccaacctagtatatgtctcctcctcctattactgctaatattaataacaacaacaactgcagtaacgaacatttgttgagtccttactatgttccagacactgctctaagcgctttagatctattaacgtatttctccttcataacaatcctggaaggagagcattattaaccccattttccaggtgagaaaactgaagcacagagaaaaataacttgcccaaggttactcagctagaaactaggagagcctagatttgaacccaagatgctccatgcacatagaaggcacttggtaaatatctagtaaaggaatgcatcttaccctggaatggcatgacaggccctcaggggagctctccagcttcacccgctattgtcaagccttcacctcctattgtctagccttcacctcaccaactttcctcctctcccctgacataccacactgccctttcatgattctgtgactctgcacgcactgttccttctgcctgggatgccctagacctcaccactaccacattcacctgcccacctgtattctttttgtttctttgttttgttttgttgcgatagggtctcactctatcgcccaggctggagggcagtgtgatctcagctcactgcagactcgacctcctaggctcaagccatcctcccacctcagactctggagtagctggggctagaggcatgcaccatcacacctggctaacttttgtattttttgtggagatggggtttcaccatgttccccaggctggtcttaaactcctaggctcaagcaatccccctgccttggcctcccaaagtgctaggagtacaagcatgagccaccgcgcccagcccccacccatattcgtcttactggactcctattgatcctttaaggcccagcacaagtgtctttgctctgtaaatccattaggagtgccctgcaaattggttctcaaacaaggcacacacacagaacaattctctgtaaacattttttacctcctactatgtcaggctcacagtgcccatcccgctaagtccagcataacgcagtctgcagggcagagccagtgctatgggtttaggggtgaggtggggcagctgcacgcagaaggaggcgtacaaatggccctaagggacaggtcagcttccaggacctgatttacacatatttctccactgttttaaggtttagaaagtccctaagaggaaaaacattaagataattgttctcgggagggggcgggggggaacgtttggaaaaatctggagacatttttggttttcaaaacctggggcagtgggtgggtgttgctggcatctagttggtgaaggccaggaatgctgctaaacatcgtacaatgcccaagacagcccccacaacaaggaattctctggcccaaaatgtcaactgtgcatggctgagaaacgtcatagcaagcccttcctccagcattatccaggagctggagaaggaagaagggtgagcggggagaaaggaaactagtgcgaccctccctctgtcccctcctcaggtggacggcgtgctagaaaactggatctggcagatggtggccgcgctgaagtctcagccggcccagccagtgaacgtggggctggtggactggatcaccctggcccacgaccactacaccatcgccgtccgcaacacccgccttgtgggcaaggaggtcgcggctcttctccggtggctggaggtaccgacctgccccatccttccttcacctcccttccctcctttcccttcctctgagagtgaatgaattaagctggtctccaacagcagcccaggcaggagaagcactaatgctcagctcacaggaatgagaaggcacaggactgacaccagaccccagggctctctcagacgcctcccttgaacccctgtttcacagaaccaccttctcccctctcctcatccactattcctcttatgctcacccccttagacatgctaagggatacaaacacaccctgtaagctatcaagcccccacacaaatgagtgggatcacttctgtagggcattagtgtccaggggaagacaggcaggcaggaggctgcagctacaaggcgaggtcacaggtacctgagtcccaggagagtcagccagttgagagattagtttcagtttggagtgtgaataaggcacctcatttctgagcaggcacgaagaacagggtgggcgccacaacacactggaccgcaaaaggctttcatccaggcagctcttctcctgcccccatcccgctgctgtcttccaggaatctgtgcaactctctcgaagccatgttcacctaattgggtacagcctgggtgcacacgtgtcaggatttgccggcagttccatcggtggaacgcacaagattgggagaatcacaggtaaccatgcctaataactcacacactgatctccactccataggggcatccaacaaggacctgcttttccaacaggctcatcattaaaacaccccaacacttattgtgagggatcagcgctcatgagaggacttgtgacattctttcaaacatgaccaatgtcatggattgctgttccagagaattcagagcaaattatagcctcaattcctattgcctgccctcaaacgaatacctcatgttggtgtgccaaatgggactaaaagatggacttttctagcaagaaagagtcttattttttaatctataatttacaaagtccaatttgggcgagttaaggagtgaagaatcacagccttaatttgctgtaattcatcagccacgttagtgcctccgtttccacatttgtgaaacgtgtatgttttagtctgggacccatttgggttgagggagggagctctgcatccaaaacttcaccccaaactccatacacactcagaaatggcccaagatatccaggaaggtctgcacatgtgcgaggaaggccttcctcccaggcttccgtgacaccaaccccacccttcacactgccaggcattggatccaaaaacacacagctggtgagattgttccccagtccaagtctgaggcccactgataccacaggtataaaacccgggaggcacaggcaaggcctttctcggtgtggaagccccagagtgccccagcctctcctcctgctgatcccttcccatagctctaggcttcaacgacacaaggtttttctctacttcacaaacacaccatggcctcttgtgcctctgggcctttgcatgcactgtttgctttgcccaccactcagccactcaaactcctcctcatccttcaagacccagcaggctcaaacaatatttcacaggccaaaacaaagagcattttacatgaataacaaagttgttgcgaatttatattttatcaagtgaggacatttttttttcttttgagacggagtttcgctcttgttgcccaggctggtgtgcaatggcatgatgttaactcaccgcaacctctgcctcccgggttcaagcgattctcctgccttagcctcccgagtagctaagccacacccagctaatttttttgtatttttagtagatacggggtttcaccatattggtcaggctggtctcgaactcccaacctcaggtgatccaccatctcggcctcccaaagtgctgggattacagacgtgagccaccacggccggccatgaggacatttttacaaacaactactatctgctattaccattcctttataaaagaatttcttttaacttgagaaagaatggggataatggcagacgtttcaacagaatacacttgtgattatgacagctcatttcctcatgcttttttgttcatcttgctggtcactggggaagcctggtcacagaccggcgtgtggcccccatggatttaacccacaatagcctggggatgagcagccctcccactgaagaagcagggccagaggtcagagtccacacccagcgaggcagcctcaggcccaaggcccagaaccctctccatccaactggtgctgtgggtcacattaggcgtatcagctgggcccacccacctcagagacagcaggaaagctcaacaccctcttgccgtcttgtcatcagcctgataaagaaaggaacagaaatcatatcaggacatttttctttttctctttcttttttttttttttttttgagacagagtctcattctgttgcccaggctacagggcagtggcatgatcttggctcactgcagcctccacctccctggttcaagtgattctcctgcctcagcttcccaagtagctgggactacaggtgtccaccaccacgcccggctaatttttgtatttttagtagaaacggggttttgtcatgttgcccaggttggtctcgaactcctgacctcaggtgatctgccagactcagcctcccaaagtgctgggattaccaggcgtgagccaccgcacccggccaaggacatttttcatttgtcactgtgggtagggctggagaacgggtgatctcacggctcactctcaattccttcgccccccaagtagggaaggaaaccagggctggggtgggacaccagagggtcctccagagaaggcagaggaagaaagacagggaaaaaaaacttggagcgcataaatactccccaaccacagtcagccaggaggtgccaccttacttcatgcacagacatctgtcacttgaggcccagagctttgagctcccctacttgcacacaacattttcacatacagtgaaatgtcccgcggctgttctggacgttctaatgaaatgacatcttaggagaaaaatcagcttgtttagggaaattattgacaacatacaggcaaataaatttcattctttgataggtaggttggaactacttataatgagcatattggctttttttgtatgcaaacagatggtcttgaaagtagcttgagaggtactcaaaactgatttgctcaagtaaatcaagcattccctcataaccttattcctttttttttttctttttgagacaggatctccctctgttgcctagactgggtcacagtggtgcagtcatgattcgctgctacctcaaactcctgggctcaagcaaccctcctgccacagcctcctgagtggctgaaactacaggcacaggccaccacatccacataacttttgtattcttttttattttagagatggggtttcactatgctgcccaggcctcctggcctcaggcatcataaccttgtgtctaccactggagagtttccgcaaacctctttccccgctagctaatgcccagcctgtgtgtcattgttagcaccatgaactactgtggttttactgagaaaaggttacggcgaggttttctagggaaggatcagccctacgtgtttcttcttcctgctagttcactgatgtataataatatccaaaagctaaaaagcacatctctcttcccctctccttgctcctgcgtaacccttacccctgctttcccattagggctggatgccgcgggacctttgtttgagggaagtgcccccagcaatcgtctttctccagatgatgccaattttgtggatgccattcatacctttacccgggagcacatgggcctgagcgtgggcatcaaacagcccataggacactatgacttctatcccaacgggggctccttccagcctggctgccacttcctagagctctacagacatattgcccagcacggcttcaatggtgagaatgaagtcatgggccgggagcaccggcctacatttcaatggggcctctggaattcagcggaatctaccaacatacgggactcagggaagagttcagcaaggataggggcccagggtgtatggtcaccaagcccacccagagagaaggaatgctggagtgggcaagggtgcctgtcccccagcaggccactcctggcaacaggccaacgccacgccctgaggatgaacagagggcaccaacaggaacctccacttctcactccagccccatgtgcccaggcaaaccctctcccggggtaccagctcttctgagagttgagtccggatgcctgtggttattcttccttctctggaagtttcctcgttccagggaccgcctctattctgaaccacatgaggatccacttaataggttgtggcttctcgatgaaggtctcactcttcatcccaccccatcagtttaattgaggaaattactcagactgtcccaatgggaaattcagcttcaaatatgtccttgttatgccctttacctcagggcagacacggaatgtgctgttatctgggttgtgatcccacttctctctcaagtcctaaaaccgaaatattaacatgcacattgataatatgcacaggattaaagaacaaaaatgtcagcagaagcagcacattccacgggcattccaaatttcttgctattataaaatatcaccctgattaagacatgccaatcactccaagccaagtagagccctccacccctacaagccacctcaccctgatcatccaacactcagctgagaacacactctcttgtgatgacaccatcctcgcctctccaatatcagagtgaccttcacactccgcatcatctcattttggctggactcccagccttccaccgcccaggcctgagagagccttctgggaacttgcccttatcattgcttacatccctcccacctcccccactccaacacctcccctccagccaccagcagttcccagctgaccatccagccctcatcccaaacttcaccccacccaacaaagctcagtacagaccatcaggatggtgtatgggctttattttcctggtaaacacatttctgaccaatcattaccatttgctcttttgtgctaaacttcaaagtgacggaaccaaatgtaggtattcagcttgcccaagcttgggctggtttttctcagtcgtcttcacccctgtgtttgaaagggttcctggggtagttctcccagccacagctgcacaggggctcactggataactgcagattcaccttcactacctcctgggtggatgagcttgggtgagttagtggatgtcttggaagctcagttttctcgtcgaaaacagcggcctcaaggagctgcagtgaagatgcaggcagtggaggagcggagggcacgcagcatacacagcctcctagtaggtgcccaaggaatgcagccgctagcgtccaaggactgcagtgactaatcttggcatttagcctccagacaactggggaaatagcttttggcaaagtcacctgtgctgtccctttacagcaagtgtttcacatatcttgtggtggttcctcaacatcccttgagaattatttaccacagattaggttaaaatttggagagttaaaaaaaaaaaaaaaaggtcaaatccttagtagatcaacctcataagcttgttttgggggtgaggcctgtccagatctggttactgggcaatgtccttccaaatccaattcttgtgctggtttcacaggcctgttacctaagggatgcaatggctgctttgggacacaaggtagacattgtcgagaggcctcagcgttctccagaccatcagagtgccacgggattgtctcgtgtatctagttatattaagagaagaggagtcccacgcaagcctgttccagaaaacccaccctccaggcatcagcacctgggcattttaaattatctcatttgagatagaaatatttctataataaattacactaacctgctctcttaatgaatttgatctttccttagtgacttgggtgcctattaaaatgcctactgtaacacgctgtcataaaggagtgctctcaggatcccggcagtgcccgggattttgcctgacactacatgactcagagggtctacttcccttagtttcagtcagttgtcacatcctgctcttgtcaaggggtctgccttgacaagcccacccttgcctgttctgtgtgctactgctaacctcctgtgggatgagaaccaaggtgatcctctgagttgaggctgctttgggttaaggggtgataacgtccttcttgccctgtgttccagccatcacccagaccataaaatgctcccacgagcgatcggtgcaccttttcatcgactccttgctgcacgccggcacgcagagcatggcctacccgtgtggtgacatgaacagcttcagccagggcctgtgcctgagctgcaagaagggccgctgcaacacgctgggctaccacgtccgccaggagccgcggagcaagagcaagaggctcttcctcgtaacgcgagcccagtcccccttcaaaggtgagtgtggagctggggagccttcagaagggcaggatgcagtcccctgtccaaagggctcagaagtccccttggcttctttcctggaggtgcttcagctctgctgttgcggtgtttctgaaactgtgcaggctccagacagcaacgttgacacagcctttctcctgtcccaagagtgtggccaccttgccgccaagggctaggaggagaaacctcgaccatttctgaaacgatccttgggttggcctctctgtccattttcatgctcccctagaatgttagatctgcaaggccacacgcagtttacctgggccacccggatctcactgtacagggacgtcaggcatctccaaacacatcctagaacccagttctttcatctctgttcacggcccccatgaaaaaactggattctagactgcatttcatttcttctaagatttgaatcagctgatctgataggacatgatattcaccctgaggcactcccaagacaagattcagcttccagtgtttcccagccagatttttaaccacagggcagaaagtgggcccagcagctctctggattgaatggaagattgtagaaagggctgtgaccacgtcttaggctgaggccagcagagaaatactccactgaaacctaaatcctcctggagggaacaagccgacatctgttgccattaacatttctgcctaatccctaaaacagctcgggagtgctttagcatctcactgtttcatcgcacagcctctccagtgctgggagaagaaatctgatgtgctgtttgactattaccaggcagatatttgtatctggagaatgtaaacaggccgtcaccaccactttgcttttagggagcattttacacaaaacattcgatgcagccatcagctccttgtggttctcccaacagccaggcgaggatggcagggctggttattatcccattctaaagaggagcaaagcaaaactcgcgtggggtgcccacagctgtgcagctgtaaggagacctggaacagggccacctgactctcagtcgtgagttcaaactcccaggcagcttatttttgaggcacaggatttctctgtgtatcggaacttttgctctccagtcaggtttccctcccttgagtcaagcaggtctaggaatgacagaaatttcttgtgggtgcgcacagcatctgaagagtagttggtgtgagggcaggatctttcgggccaaagggtccctccactggctgtcccttagggctggaggagatggcagcacgcaggtgagggaatttggaagtcctcctgcttcggggagctcctccgctgcaggctgccaattaaagactcatttgggtgaaccagctcctcttttaaatggcaatgccgcctggagtgattaagcctcttagataatcacatttcactggatctattttaatcatggaatgttcgcatcatgaggagcagttcaaccctgccgtttttcagatggggaaaccaaggcctaggcagggaaaattatttgtccagagacaaaaagctcttggcagacctggcatttagacctggggcctccaaagagtgagcagagtgatttttaaaaactcctaaacctgccgctggtctgtttatggggataagaggggtatggaagagaagggtgggggaattgctttctccttgaaatcacctgggaagaaaagaggtcatttttcatcttccagggctaaactgggcacttcatctgatttggcccagccctaggacatctactggggacttggagattgggaagggaagcatcaagagaaggaagaaggggaaacaagagcagtaggcatgaaccaggctgagcttctcccatttgccaacggccccactgcccgaccaccatacactgctgatgtgaactcacaaggatccctttgttattaaggaagaccaaagaattgcattagggcatcattatctcacccaccagctaccaaaaccaacgtactcatccatccgtatattcttcaaacacagtcctaccctcagggggctcggtggagactaacccacgatgagttccttggagaccacatttgtgtctctttattaccgactacttatcttgctcctgggacatctagtgaggaggaggttaagggcaggactgactgaaactggtcaggaaccgaaagccccaggctggagggaggttccagtgccgagctgtggcttgtaccacaccctctccttttctttcttactttttttttttttttttttttttttttttgagaccaagtctcactctgtcgcccaggctggagtgcagtggcgtgatcttggctcactgcaacctccacctgcagggttcaagtgattctcctgcctcagcctcctaagtagctgggattaccagcgtgcaccaccacgcccagctaatttttgtatttttagtagagacggggtttcgccacgttggccaggctggtctcgaactcctgacctcaagtgatccacccgcctctgcctcccaaagtgctggaattacaggtgtgagctactgtgcccagcccataccctctccttttctgctcccccacaaattctccccagttctcctgcagcccctccagtgagcaaagtcctcacccgctcaacccagtttcacttgctagtggaaagtaacgtctctgtggtcacatcaagccaccctgggcatggctggaaagtgcactcatgcgagactcgcctgtttgaagcagctgctcatgggatactgctatctatataatgttatgttatccaatgtggtagccacaaaccatatgtggctatttaaatccaaatctaagttactttaaattaaatggaaccaaaaattcagtttgtcagttacacaagccacctttcaagtgctcaaatacgtggctgctgcatcagagaacacagaaataaaacatttccatcgccgcggagagttctactggtgatgctgggatgaagattttaatctaggccaccacagctacaccactccctgcccatcacaaccgtgatcataactgacttgggcccccaaagcctattccaccagccacctccagcattttgatgaatacatattacactcttaaaagagcagacttgcccaaccccggcctacagagaaaccacaatccccatttttcaaaaacatctaattgtacaatgtattttagtgcagggtctggttgggcaagataaacatcgcctcctgattgtagtttcacaaaggatgactaacttggcctgaattcctctggctcccaagatatttcgacaaaaccatcaaaggatctattttctacaactgtacaccagaactcgggtaaacactgcgagagtacagcagtagcaagagagaattgggaaacagtcgccgagtgaaacgaggcaatttatcgcccacttccattctcactctctcacaaggaacctttaccagtttgggagcctgtttttaagggagggggagggaaacggatctgtacggagtaaatcctgtttcgccagtgcctcctctcatttcatcctcagagcagtcagatgaggtaaccgggtggagaggagggaaggggccctcggggggcactctgcccgggcactgggctggatgtgttgtacacgttagctcatttcccatttgatcctcacagcaacccccagacagggagagacacacgcacacacagagacacggtcagggcaaagtcacacaatttgtgagcaggaagcatcgcattgaatcccagcctttgctccttttactgcacttggcctcggcgtaggaccaaggccctcgactgagtgcctctccctcctgcggcattccagctgcatgtcccgcctcctcctctctgccctccttccacactccctcttccatatctcctccactcttctcctgtcttccccgtgctgcccttccccctcccccgccccctcacccacggccctgcactccaggctccctgggtcgggggtgaggggcacttgcttctgctgctcgccgcagccatgagagcacccttccttgctggtcggcgagatgacgagccaagctgtgactcgggcagtcggtctgtttttggcttctctcagctacttctttggaaggtttccactgacttcagggagagttccagaagaagcagggggtgtcgtagacagcacaggcttggggttgggataaggagtgtcaagaatcttggccttgctgccaaccacttatgtgaccttgacctaatgacaaaacctatgtgggcaccaaggaagaggtgtgaatagacatggggatgaaccactagcacgggacctgcaggtgggtctcaaaacctgccccggtcagttcagtgtggaggaaggaagtagatgacacccgattaacaccttctggaaggcaggcattttttcatcgccatcttatcacatttttacagcgacactacaagaaagttcctaacctgcattcacagatgaggaaatcgagccccagaaaggctatgtggtctccagatcacaaggaagcaggcatcagagaggactcaaaccctgggctctgtctatccgttgagggcccttattccacccacagcacaaagagctggcaacaggacgccagtcagcacaacagtcctggccgcacacacacactcccccatctccaccgctcgcaggcagcaacagacccccacagaaggggcaggcattggccaggcacggtggctcacacctgaagtcccaacactctgggaggccaaggtgggaggatctcttgagcccaggcgttccaaaccagctcgggcaacaaagcaagacgccatctctacaaaagaattaaaaattagccaggtagagtggtgcatgtctgtagtcccagctacttgggagactgcaggagggttgcttgagcctagaaggtcaaggctgcagtgagacatgatggtgccactgcactctagcctgggtgacagagtgagaccctgtttcaaaaaaattcaatttaattttaaaaagaaaggggcaagcatccagtctcgtgacatcagggcatcacttaaatgggactgtactgttaaaccaaaatgtggccacgaaaataccgacacatacaggtgttacatacaaaggctaacaaaatcactttccctttttcttcttcactcgcgcctgctctgagttaattcactttcattcagccttgccggcactggctgccttctttgggcagcaacaccctggacaacaccatcctgggcccctcaatcctatgatcttcagcttccctctgagttagaggcatttcgggtctaggaacaagccctctgggcttggagaaaacacaagaggtctcattcctaccatctccatgagagaaatccatacacggagggggaaaaaaaaaaagccctctttgatgtttgcaaagagagtcataatatctcccagagccaacatctaatgattcagaatcattgtttctgggaggcaaaaaatagaaagaaatatattctcttttcataaattcaataacctgatcttgtgaaaagaaaatgtaagttttttcttttttaaatggcaccagcagggtccacacagggttacaatccaggatttttcctagtgaggagactctccggaggcctcagatttctgctgtaaatggagtttccctgatcacattcgaggtcaatggactatttcatgcctttcatctttaagacctgaaataatttctcctgccagaacttgggagtatgttgtactggtctctttgcagtcacaggattaaaagcgttttccccaaatcattttttaacgtccttattaaacatgtcataaggtaaagtgggcaaaatcactcacacttttttccttaatctttgtaatagcatcattgtgctgggggtggcagggtagaatgataggcaaattgtcttttcttttcttccttttttttttttttaaagaaaaacacttacaaaaatccaaataagagtaaataattaggactgggtgtggcggctcacacctgtaatcctaacactttgggaggccaatgcaggaggattgtgtgagcccaggattttgagaccagcctgagcaacatacagacctcatctctacaaaagaggaggaggaagaagaagaaggaggaggaggaggaactagttctcagcaggaaccagttctcagcctgaaagactcatttatatttaaagttaatttcatttaaagatttctccaaaaaagggcagtcatgcaagattctccgtgcagacatggagtttctcaggagtgctcctgcaaactcaagggtgcctcagccatcagcgcaggttccgtccccagcccgttccctggtgagcctcagaaagcatgctggcttggctcttcacagcccacacaccttggcacgttccatcctcctgcagagatgctactctagggacacatgttgtagaaataggcaattctcattcataggatgtgcaagctaaaggggcctttgcatcctctaaagctgactcctgggttttacacaagcactttctcctaaaatcgtggaaccatagcatctcaaatgcagaaatcaatctcctcctactcacaatttaagaaaaagggaagaaaaagtgtatcgccaagacaagggcatgaaacattttccccggctcaggggccagacgtttaggggacaggagagcgtcctttgtggcagcgatagcccaggatggatgtcaaggggtcagagctggcaggcagtttgtcttggtggcttcattagaagcaggtgttgaaccacagcttttcttcaggggctgttggccatttgctttcaagggacagactcagcttgcagaacgaaaacagcaggcgatatagaaagagtcttttggaattagacacacctggctttgaatcctgctccactgaactatctggataactataggtctccaaacctccacttccttatttatattcaccaggataattaacactgtgtcggtctaggtctcagcagaaaacaggactccactggcctggatcagctgaagaaagcaagtgggactccttacaacagggtgggcagtgttaaggaaaccaacaaggactgaggcgactccctgcctctaacagcaggacagatggagccagggaagggactagctgtgggaaaaccagagccatggaggaggggctgctgataatcgtgggagggcagtggctgcacagtcaggctccagagcacgggggagcagagggaaaatgcccctgcctctctcttctccgccctgatctcctgctagtgcctctccctccagtggtcacacccaaccagaaaccaatcgacaagggagcccggcagatgcagcctaagggatcccatcctggggctcagagctgagcagtggagggcagagtggatgaggacagcaggggtagagggagcagatgggcactacccagcagggcatcattatttagcctgttatgaggagaaagatgatgtatgtaaaacacttagtatgtagcttaacacatagtaggatctcaacaaatgggagctattttatcatccttggtgtctttaatgcagttatatatgcatgttgttcttcactcagagagcctgtgaagtactccttggaggcctagtgtgtgctgtgcccttgtggagatacaagcagtagtgtggttccgagatggcctttggggagataagacatggacacagatgcccgtgagacaaggcagaggccacaaaggaccacaacttctagttctcttttttttccttttcaatacttgtaaaagctctttctttttccaataggattccaattagaatacacgtttactgcagaaaatgtgaaacttgcagaagaacataaagaagagaataaaaatgaccactctgccctctccagagataagcactgttaatatttttgtgaattcccctacttctatgcattctgttttgcagagttggtctcatactagacagtttcgtagcctgtgtttttttgtttttgttttctttttcacttctttcataagcattgaaatcattccaaaaatagcttttaatggcttcataagagtaaatcacatgtttgggacaatgaactgagaatcagcagactaacttctaattgcagcttcatcagttattagccacgtgacaacgacaagttacttaactttttctgagcctcagcttcttcctttgcaaaatgatgtgggagggaagataaagtaggcatcttataaagttgttgtaaagagaaatgagataattatatgaaactattagctcaatgtctgggacatagtgaagcgctaaatagtagttatcataattgctgttattagttcatagccatccctctattactgaatatttcaggtgttttcagtgtatttttacacaaatgttaggacattttttaactgaaatctctttccacaattcaactttttccttagaatatataaagctagtggtcctgggtataaacatgtaaaagttcaagttctggagtcaggttgtgtgagccgacgccccagccatatacgacttactagctgtgtgatccgagaaaagtcacttaacttctctgtccttcagtttcctcttctctaaaatgagataataatcgtatcatttgtttgagggtcaagtgagatgacagaagcaaagcacttggcaaaaaccaaaatagatattagccaatgttattatcatgcatactgccattatatgctctttttttttttttttttttttttgagatgtagtcttgctctgtcacccaggctggagcgcagtggcgcgatctcagctcactgtaagctccacctcctgggttcacaccattctcctgcctcagcctccccagcagctgagactacaggcacccaccaccacgccccgctaattttttgtatttttagtagagaacggggtttcaccgtgttagccaggatggtctcgatctgttgacctcgtgatccgcccccctcagcctcccaaagtgctgggattacaggcgtgagccaccgcgcccggcctcattatatgcttttaattgcatttagcactgggctaaacacacagtagacttccaattaatacatatcatattaaactgaattgaagatcggttactatgagtgttccttgagaactctggaaggtaccctgactattcataaggaggttaacccaaggccagtcctcccacatcttaccccctcccccactttggaaagaactttctttttgtctcagtttgacttacaagactgttcatttgttacagagtttccttgacaaacccccaaatagtgtaagacctctccagaggcttctgggatgacaggctaagtccctctctccagtggtgccacccaagagtttagggacccttcccaggacttgcgcctatagctcttttctttttttttttttcttttttgagacagactcttgccctgtcaccaggctggagtgcagtggtgcaatctcagctcactgcaacctctgcctcctgggttcaagcaattctcctacctcagcctcccgagtagctgggactacaggcgcccaccaccacacccagctaatttttgtatttttagtagagacggggtttcaccatgttggccaggatggtctcaatctcttgaccttgtgatccacctgcctcggctcccaaagtgctgggattacaggtgcaagccaccgtgcccagccagctgttttcttacttctcacccacagcctcttttgctgtcttgagggcatcacattgctttattccaggcttgggatttgagcatctattgtattacagcaggggtccccaacccccgagctacagacagtgggcaattaggatccgggcctcacagccagaggtgagcagtgggcgagcaagcataaccgcctgagctccacctgtcagagcagtggcaacataagatcctcatagcagcgcaaaccctattgtgaactattatgagaatctaatgcctgatgatctgaggtggaacagtttcatcctgaagctatcccccctgcccccacactggtccatggaaaaactgtcttccatgaaacccatccctgatgcccaaaatgttggggactgctggtgtatagggtactgtagtaggcaccagatactacctgagctagctcttatctaaagcagaaaactcttggccaataaatcaactcttagtatttggctcttgttgtgaacataaataaacatttggtgcttcagagataacccctttagtaaacccaagagatatccccactcacatgagcaaattatatacaaaatccaaatgggaagattagtttatgccaaggataggattgtgtaatctagaaacttggcaatacaggcataccaggacactggagctggcagtaccctctgctgggcttgctgtatagctaccaacctccggtagaaatagtaccatttaggagttagtagattgattgatgaagagatgaatttccacatgctgggtacaagggatggatagtcaagtggctagttaccgtgatctaattttttgaaattctcctatgacaaagcttgaaactcaggtcttgaatcctcagaggtgatttccatgttgttagatgttaatgtgcattgtgatacgtcacccccaagcaaaccatcagttcattcatcccacaaaagtttattaagcacctactgtgtgcaaggcactgttaggattcgtggattaaccattgtctaaacaggaaaggcaaatacgcagcaagtattccataaatcccttatccttttcccaaaccagacactcatcttgccccaagcccggacatggcctcagaatccatctcaacagagggatccaggcagttcttatcaatcaaatggaattaacatgccgtattaaacctgtttgcaatcttggagctagaacactgtagatgcttagagaatatggagacaagagagctcaggaggtcaaggctgcagtaagccaaggtggcactgcacccaagcctcagtgacagagagagaccctgtctcaaaaaaaaaaaaaaaaaaaaaaacccaaaacaaaaacaaaagccaatcctggtctggaagctggaccctgcatccaaccctggggaatccactggggagaatatggagacaagagaaagaagtccaagcagtaatcagccattttggaatgaggtaggataattttcaaaacagctccatagctgtgccaccatgcaagctaagcaaacaccatctagggtgagggaagctaagagcacagatgctgctatttgaccttaagcaagtcactttcatctatctgagctccagttttcttatttataaaatgggggtgataataacaatgcctacatcatagcgttgtgatgagtaaatgagatgatgcaatgcattcaacaatgcaaaaatgtattatcatttaacgatgccatgtatttaacaacgcctgtctaatagtaagccatttgctttcagtaactaaatgtagactgtattaggtaaagaagaataaaataaattatcctcttccaaccaacccatcagtaggaggacattccagacatgtgataaaacagaaagattttaggcccaagttctagaactacagttatcttatttccattaggaaatacacttattgaaactcacagagcttgtttccaggaactgccccggaatataaacgcttggtcactagggcatatatttcttggctggagctctgccccaccctgaaacacaccccatcagagagcagcaataatgtaaaatggcaatgtgttctctcttgccttgtcaaatgcctaaaaggcatatattctttgatttacgaaaggagaccctcaccaaacacatgaaatattacagcagaacttgcatctagaactcagtgagaatgccagatgtcctatactcctattctgccatcttttgttggtgaatatttatcattattacattacaaacacaatataagtcctgaatagacatttaggaaatacagagaaggaaaaacaagaagataaaccaccatttaggagcaaaaaaatgttgttaacatattaatatctatccaaactcttccctctgcatgtttaaattttaagaaataagagatttttaaatttaaaatcactgcttaaattatctctctctttctctctctgtctctctctctagtttatcattaccagttcaagatccagttcatcaaccaaactgagacaccaatacaaacaacttttaccatgtcactactcggaacaaaagagaaaatgcagaaaattcccatcactctgtgagtaggaggtgtagccccctagggtgatgacacacttatttttcttgcagaacataaatggactctgtaattttcaagagtcaggccagctacaactactttattccagacgcaaaccaaaaactatctgagacacatgtcaatcaatttagtttattttgccaaggttaaagacattaccgtgacacagcctcaggaggtcctggtgacctgtatccaaggtggtcaggctacagcttggttttatacattataggaagatataagacatcaatcagtacttgtaagatgtacactggtttggtccagaaaggcaggagaactcaaagtggtttggggttggaggtgcaggggagcttccaagtcatgggtgcattcaaagattttctgattggcattggttgaatgagtttatctaaagatctagaatcaatagaagagagtgtcgggattagataaggggttgtggagaccaaggttcttattatgcagaagaagcctccaggtagcaggcttcagagacaattgattgtaaatgtttcttatcagacttaaaaaggtgccagacttagttcattctctcccagatcagtgaaaagatctggatagggaagggaattctctacagaatgtagattttcccaccacaagacagctgttcagggccctttcaaaatatgtcaaagaaatatattttagggtaaaatagtttaatttctttcagggcctgctgtctgtcatgtgatgctatactagagtcaggctggaatttggtgtcttattgctacaaaaagtctgcttcatcagtcttaaaatctgggttttaatgttaatgctggtcagttgtgcctgaattccaaagggaggagagtataaagaggcgtgtcccacctccccttcccaccatggcttgaactttggaatgcccttggctgagaggaggggtccattcagatggttggagggcttagaattttatttttagtttacatgggcttgagcatttaagcaccaatcacatacagggcactgtggtaggcgccagatactacctgagctagctcttacctacagcagaaaactcttggtccacaagtcaactcttagtgtttggttctttttgtgaacataaataaatatttggtgcttcagaaacaacccctttagtaaacacagcccatcccacatggccatcctggtcagacaggacatccacccaagcccgaaccctcacgtccctcctcagcctctccagctcccaccaactgctcaatgttatgcactgtgggctgagcagacagggaagccagagatggccccactagggcctgcagtgcagaggcaggtggtgaggggcggagcaggtgttcccaagaggtcccaagagcctttccagtgagttcataacccagaaattcaagtggtatcttttgacttggcacagatttccaatttcaatcagcctgctctgccagcctccccatctgtccttcaccctgttacccacctgctcactctgaggctccccagcctctctggcctctcaaccctcagcatggactctccctggaaagtgacactagcccctcacccactccagagatgatcctgagcttcccgaaaattgcccccagctttggatctctgatcatcacactgattcagtcattcagcaagcatttgttgatgctctgtccaacacctacctaaggatacagaggaccctagcctctggatgctcacaacctggcagggcggggggattcctaaacaattcttcacagcatactcgggaagagctatgccaagccacacaagggacccccccccaaccccaccatccatctgcctcgccctaaatccactgctgcctctgcactgccaaaaatctctcccaggggatggttctcaatagtggaaagggcatctcgctgctctgtcaacgttgggatattttagtgtcttggagattagtgagtaaagctgatcatgatacctcagagtctgcatttaaatcttgctctaaatcggtgcatcctttttatgtgtagtttttctattactgttatgcctcactgttttaacagaggtttctatttatatggggggaggagcattacttgggagagagtgcatgctgcaggcatactatgttaaacctacagagagctgaactgtccagacgccgttgccaaagccccactgtctccacagcggcttcttcctagaagctaagctagagaaagttaactagatttgttatagtgggacttctcggagcctttttgatgtgttaaccagaaaatagtatagttttcgcaattttattatctggaaatcccttttttatcctggcacacctactgctaactctatcaatagtctgttgaacactagtttgggaaatgcagcaaaaatcccaagtcattcagggaaacacaacacatcctgaatgtgtgtgaccgtcactttgctgttacgactaaactgattgtgtctgattttctttgtgtattcaaggggcaaaggaattgctagtaataaaacgtattcctttcttatcacgctggatgtggatatcggcgagctgatcatgatcaagttcaagtgggaaaacagtgcagtgtgggccaatgtctgggacacggtccagaccatcatcccatggagcacagggccgcgccactcaggcctcgttctgaagacgatcagagtcaaagcaggagaaacccagcaaaggtgactgctgattcaatctcctattaacgtccattaagcacccacttgtgccaggcagtctcacaatttaatactcacattcatcatgtgaggtgagtattattaggccctagtgatggagtacagaagctcagaaaggtgaagtgactatcccaactttacacagccacaggtgccaggacaaggattcacacccaggtctttgaatacacaccagggtctccccactgcccgtggctaacgctgcctgcctctggagcctgaggaccatcacacgaaccccaggcttctcaagcttcggtgcaggtgaatcaccaggtgatgtcagtgctgccagtccaaggtgctgtggtagatgcaacatcttttttttattgtttgcccaaagaaaatcttttaacagatcacaatatcaaaaatctcgatgtatctctctctctctctctctctctgtggtcgtatctttcaaatgtcagttgccaaagaatcactgggaagccaaacacatttgcagaattcctggacctacccgcagattcatggtgggcttgggaaggggtccaggatgcctgttgttgaatcagagccctaagaaactccaatgtagaacaatgggtcacccgaaagaaatgctgctgtgtttgatttaacatctcccgtggccccaaagtctccagggatacgaaggagctggggtggggagcaaagaaaaggaaggacagggctgggcgtggtggctcacacctgtaatcccagcactttgggaggccttggcgggcggatcacctgaggtcaggagttcaagaccagcctggccgacatggtgaaatcccgtctctacaaaaatacaaaaattagctgggcgtggtggcgcacaatggtagtcccagctactcggggggctgaggcagaagaatcagttgaacccaggaggtggaggttgcagttagccgagatcgcggcattgcactccagcctggatgacagagagagagactccgtctcaaaaaataataataataatagaaaagaaaaggaaggatgctccagcgctcctgaagtcctcccagcaaaagaaagggctgcccagcacaccctgccatagcaaccgtgcttttcggtcatccgtggttctccacggcagaattccaggcatccccgggccctctcctctctcttcccttctctattcaggaaacggtctctcctctcccaccttcacttgtcgcgaaggccatgtttctctttggcttgtcctcatagaggtggaaaacagcaggtttctaacctctgaactaccctcttccgtcaccccctgggtttcactgccagatgccggcctgtggcagatgtatgcccctgagtccctttatacaaccgcactctgagattttatctccctgggatgcaaaatcctggcaattactgagagcatactctgccgtctgccaacagatctcccaacaggatcaatctgggaagattaaactgctcgctcctcttctgcactgagctcttctcacatgactctttggcccattggagcagcgctgcttctgagctctgaccctgcccagatgctcttagctggagagtaattcctcagtttaggtggctgctcaccctgacaatcccatgtggcttgacctgaaagggtggctaaagcacaacactaccttctccactggggcacacccatgtggtacggaagaagaaatgaggagagggaggggcctggcccttccagggctcccacacggggtgagcattgaagcaggtgctccatggcattggtctcacgtgatctttgctgtgatcctgaaatgggtagtattggctgtgcagattaggaacctgaggctcacagaagttacacagcttgaggacattgctcaaaattgtcccagtccagatttgactgggatttgtctgatttattacccatttgttgggggtgtgctgtttccaacagttccttcttccattagttttggttccattaatctgaattttctcagtctaatctagcagagttgcagtgctggacattaacatatgtatgcatcaaacccatccttagggctgtaggaggtactgtatgcgggttatgggagctataattttttttaggttgtaaataccgagtgcctcctctgtgtctacacagtgccaggtactatcggagaatacaaaaaaaaaaaaaaaaatctgagttgtggctcttggtagaaataaactccaggacctaaccaggaaaataagatgaattaattttactaacggtgtggtccatcccagggcttctcaaactttcacgagcatacaaagcatctgggaatcatgttaaaatgcaggttctgctttagtgagtctggggtgagcctgatgttctgcatttctaacaagcgaccaggcaatgctgttgctgcaggtcaacagaccacactttgaatagtgagagtccagcattacacaacccgggaagtgtaagaagaaagttcagacccgtacacttggggctgtgctgcaacatgctttgaggaggccaagaggtgttcccagggagacaggcagccggcaaagcaatatggctggcaggatcggatggactccagtgtcagccagtcctaaactcacattttaacttcactgctcacaatctgtgtagcctcaaacaataacttcactcttcaagactcagttgtttagtgataaacgagaatcataatatacatttcatgagactaataacaactactaattttttagtgccttttgcagaccaaaatcccagaatcgggatgggaacattaaactctacactcgtaatatcgctgctaagtgcaagtgggaaaagaagtaggttaagtaacttgctctgtgcctccatggaagaaattcagtggaaggtggttttcttcccccaaaggcacaaaatcagggatgagtagggttgtggagatggtgaagagaaagagaagaaattattggccctacagcaagaccaagtataataactggctaaacctaatgagaagacattcaatttccacagtactcatataaatgcaaaataaaatcaaagaaattatcactggttactcattagtttggcaggaattcaaaaacggacaacacccagagttagtaaagatgtggagaaacgggcattctcatacactattagtgagagtgtaaattacaggcattttgtaggggaatttcattcaacaactaacgtttagtgagtacctaccttatgccagacaatgttgtggacaccagatgtataatagtgaacagacaggctgggctaaaatacaaaaaaattagccgggcgtggtggcgcatgcctataatcccagctactcgggaggctgaggcaaaggaatcgcttgaacccaggaggcagaggttgcggtgagctgagatcacaccactgcactccagcctggcgacagagcgagactccgtctcaaaaaaaataaaaaatatatatatatatatgtatatatgtgtgtgtgtgtatatatatatgtatatgtgtgtgtgtgtgtgtatatatatatacatatatatatacatatatatgtatatgtgtatatatatatatatgtatatgtatatatatatatgtatatgtatatatatatatagtgaacagacagagtccttggtctcatgaagtttacattatcacatgtttaaatatgcatactactttgagccagaattttatttctaggtgtcttatcatctttctggagtatctgtgcacataatcaaaatatgcacaaaggctatatatgaatacatatgtacagaatgtttgttgcagtactattaaataaatactatacataataagtaaatagtaaactcttgagaaaatcttaatgtctaacagtaggaaaatgcattgtggttcatccttaaaatggaatgtcatgaagcaggtgaaaaatagtgaaatagacttctacctactgatatgagcaagtctctgagtaccattttctggtaacaggaaaaattgcaggaaaacatacacaacatgatgccactcaatatatgtaaatgcataggaacaagtctggaaatgcataaaccaaatcataaatgtagagaggggagtgatgttagtgaaggccgatggtgaagaggttctttattatttggcttcatttattcctttaccatttgaattttcaagaatgcattcacaaattactcatagcatttttaaattttaaaagtccagtttagtgaagacttgaccttagacgcaattcaaagaaaaaagaagtaataaactagaatttttctacagatatatctatagatatatatttaacagatgcaattggaaataataacacaaaatggtatctcgggccaagccaacagccaaagcagtctagttgttgtttccaaaacacatagtagtgtcctctttagtggacaatgtcagctccaatatgaggaaggggcagggcttacagggctgagccaggcagaaaccgatgacactggcctcatgccaaggacctttaagaacagcatttacaaactggagcttgtccaaggagggaaggctgaggaggtaagcttgccttaggaggaagggttgaggaactagaaatgtttgccctgaagtcaaggcaaatgtggtcaaggaaacaatagtcaccctcaaatcttcgatgagctgtcataggggagaacaaaggagggctgccccaggactttccttcttacagaactgaaatcaccccagtgtagaactccaggaagtcttacactgatggctttcactgacttgggttttgtttttctctgaagttacaaaaatatttgcgaacataagaatctaacttaaaaaaagacatcacatgccttacacaaattgagtgaaatttgataaagaatgaaacacttcaataagctccacctaaaacttaatgctgtgtttgcttcctgttttctattcagaatgacattttgttcagaaaacacagatgacctactacttcgcccaacccaggaaaaaatcttcgtgaaatgtgaaataaagtctaaaacatcaaagcgaaagatcagatgagatttaatgaagacccagtgtaaagaataaatgaatcttactccttatctggaatggctgccttatttagaagccaaaattacataaagaatctcacacaaagcttaaataaagtttagatttaaggggggtatgtttcactctcataaactgagcttttaaaaacgatatgatataactattttccagtatcagtacaaccaaaaatgtcccaattttatctctggttaaatgttaatatatgcaaataagtacaaatgcaagagccattttagatctgttgttctaatttacaatgtcttttataattaagtttcccacatgtccttgctagtttattatgacccatttttgaaccatgctagaaagatacttttttattaggtaactagtgcttcaataaagcaagattctaattaatcaccactagttgtgtataccaaatacacatcctttaagacaatacagttcttaaaagaagaaaaattataattattctaatatttatacaaatcatataacgatttcacagaaccaaacacttacaagtagaattctactaaaactacttgtgataacagtgaaagctagacatgtggtcattttaataatggaattacaaattaaataaacataattattatatcttactaatgcttgcaacaaaagctaattttaaaaacttggaatgtctcaaagcatttgctatggactgaatgtttgagtcaccccaaaattcatatgctgaaatctaatccccaatgtgatggtgtttggaggtggggcctttgggaggtgatcaggtcatgagggtggagccctcataagtgggattagtgcccttataggggataaaggatcagaactctctgccatgtgcggatatgagaaggcaactatatgcaaaccaggaagttgaccctcacctggaagtagactaccagatctgctggcacctttatcttggacttctcagcttccagaactgtgagaaataaatgtttcttgtttaagccatccagactatggtaatttgctatagaagcctgaactaactgagagagttagatgtcaaatttcaaactgtccaataagtgaaataataatgttttgaccagcaaattccatcacaaagcacatggtgacaatggacgctaaatatggtaatcagttagatatgtgttttacataattcagagaggaggaacatgttatgcacattaaacaagctaacctaacttgcacttaggctcagctatatacagaccataattcatattctcttcaccaaagcggggtaaactggggctcatgaaaacaaaaatcctggaaagatgtctgcctctgactaatcaatttaaaattatcttgcatgattcacttttatttccctttgaaagacctagaaatctaaaacttatggggtggtgggataggaagaacagctggtcaatgtttccaaatgaagcattctgtcctgaatgctaatcttacctgcaaaagtatttgaccctacttttagggaatgtgtgtgagtgtgtgtctaaaattgatagataataaaatgaacatttcccattatgtctagaatactaaggtttacaataaaatgtttgcattggattgccaggttttatcattaacgatccagaaggaatttagaatatcacttttgaaaaacaacagggaaacactctttgctgtatatgcaacagagtccatgcatatgtattccaggagacatgtatgtgagccttgaaatcatcgcagccagaaacagcccaaatgtctgccagtacgatgcagaaatgaactgggttatagtcttgctaatggactgtcgtacaaccgtaagaaagataagccaaagctacacacacaaaagaacagagctggggccagcgtgaggcagcgaggcatctagggagcaacatttaaggaagcactcatgcatttttcgtttgcacaaagacacaaaaaaaggtatagtatgatacaaacaatggataaacacctgtaatcccagcactttgggaggctgaggcaggctgatcaattgaggtcaggagttcgagaccagcctggccaacatggtgaaacccggtctctactaaaaatacaaaaattagctgggcatggtggcgcatgcctgtaatcccagctacttgggaggctgaggcacaagaatcccttgaacccgggaggcagaggttgcagtgatctgagatcgcgacactgcactccagcctgggcaatagggtgagactccgtctcaaaaaaaaaaaaaaaaaaaccaaaaggaaacaaaacaataaaatcattatcacaaaaggaaacaaaacaataaaatcattatcacaaaagtgaggctgtgataatcccaggaaagaggaagggcaccctggagttccaggtgccagcaatagtctacttcttactccaggtggtgggtacacacacgttcactgatttaaccgttctatatacatctacatttcacgcactttttagtatgaatgtcacctttcacaatgtgaaaattaaaaagggaaaataaagggcagagttaaacaaacatgtttctactatagtgtgatatgtttcaaaagtaatatagtttcacaagcaatataattagaaattatttcatctttagtaagaaaacttgaagtgccacaatacatggtaacattttgggcagagaattcaacaagcatccaacgtgacaagtggttaactggaacatttgaaactcctcttggcatgtccaaatctggttgccaattctgttgtcggtggattattttcacttggagggatgtgttcatcgacatcacattttcttaagtatattcgagtagggaagtcaaattgggaaactgaataatgcagtcacatctgttcgttgcacatgcaaaatgctggctcgtgaactgattatacacacctctctccaaagaatctgcatttatgagcccactcaggaaagataacactagcatcttgccttttaggcaaaagcttatttgtgcttctcttgtaagagagcactgggaaagaaatggaatgtcgattacactgcagctgggctctttgaggtgagtaagtcagagagagaaggaaacaagcactccattcaacattaaaatgaacgcactctgctgcatcgcaaagctccctgtcctcaatgttcaccttgagtcatgtcggccgcaaatactgcaaaagcttggattgcaatacacgtctgtggggcagcaaggcaaggggtaaagctgcccagtgctgtgcttgccctcccacagaggctggaccaaagtaaagtcagagggatgggaaatagacaagcaagatgaagactaaagaaagtcagtcccaaaagggaccatttacatggtcccataatacatacttctatttgaatcccaatgatccgtacatgattaatggctcccgacacatctcattccttcccttctcttatcccttcctccttttcttttctcccctggaattgctctgcctaacttagtcctatttatctacccaggcccagttattttcaccagttgcctcctagcctggccaggccacagagatctttctctcttctgagcgcctggcaatcacataagtgacgctctccgccatccacttggcctttagttatttgtgccccgctgattcccctccaacctcccagcctccctgctgctccctgccctccattcaaccattccaggggagcccagacctccttccctactcgcacgtttctctctttataggcaatctcacccactcctatggctttatttatgatcaaccacataggccaaccattctcagtgtagagctccagcctgggccttctctccagacccgtattcccatatattatgcaattgtccattccacagttcccgctgtgtcatctctccctgcatccaaaaatgaatgcatgatgtttcttgcccctggaacctgctcatccccattctctctgttgtttatctccttgaaggtcattaccacccacccagttgctggtggtggactctggggagtcatccattatgtgtcctcccctttggcccctcacaatccaatgatcaccatattccatgaattctactcttatttcttaagcgtgtctatgtctccccacctctactgccatcaacccagcccaagccgaactatcgcttacccagacatttgcaacaactttccaactcatccctcagacaccctcctccctctcaatcccttcccctcacagcgaccagagtgatcttaaaaaaaaaaaaaaaaaaaaaaggttatatcattttcctgcataaagccctcccaatgacctcccacgttttttggaaaaagtccaaaataattaccctggccttcaaggctcccagtcaagcccctacttttctccccagtcttgcctcccattactctctgtctgtcactcactaggccattgtccagctccacccacggagtgtccgcccagcctgcattttatttttaatttttatttatttatatatttattggagacaaagtctcactctgtcacccaggctggaatgcagtggtgcaatcacagtcattgcagccttgacctcctggggctcaaacaattctcccagctcatccttccgagtacctgggactacaagtgcacactgccacatccatctaattcctaaatgttttgtagagacaggggtctcactatgttgcccaggtttagcgtgcactttagaaatgcctgaggagctttaaaaactagccctgcctcagccccacacctagagattttttacttaattggactagggcagggcccggagattaagactgttgaaagctccccaggtgatcctaatatgcactaagtttgaaacccagaggtctagacaacaccagccacctcagttccttcaaaagcgcaaagctctctccttggccccttctgttgcttacactcccacctctcctccattgcatgcttgcagctccaagttaggtgttactgcttgggagatcatttaacaattatctcatcctacccgagcttcaagcagctcaccctgccatccatagtcaatgtttttttattctcctggtgaaatgatttgtggccatgccatgcagagccacattggagcctgaggcaaaaggaaaaatcagtaatagtgaacctgtgtttatttatatatttattttttagatgggtctcactctgctacccagactggagtacagtaacatgatcacagcccattgcagcctcaacctcctgagctcgagggatcctcccaccttagcctcccaagtagctaggactacaggtgcatgccaccaagcccagataatttttatattttctataaagacaagggttgcccaggctagtcttgaactcctgggttcaagcaatccaccctccttaccttcccaaagtgctgggattacaggagtgagccactgcacccagcctgatcttgctgtcacctaggctggagtgcagtggccaaatcagagctcactgcagcctcaacctcctggacacaagcaatcttccggcctcagccttccaagtcactgggattagatgtgagccaccatgacagcaaaatgtttatattttatgtatcatagatttttgcattcatttccattagaaaaatttttgcattaaaaattttcttgataactgagtttttggagcccccttacatttttgcactcaaggcaagtgcttcactagctttaccctagccgtaggcctgatctttgaaatggtttctttactgcctttctcccccactggccttgaagcttggtgaagtcagggagaggctctcattgttcactgcattattcccagtgctcagcctatcacctggtacagagttggcatcctgtaaatgcttgctgagttaataagtgacaggtatctcttcttatctgtatttttttcctcttgattaaatcagaagcttcagctaccacacctgtccaagatagagttcactgcttcctcattcagcttagaaacaaagccaggttggcgaggcggttgacttcctccctccctcatctcttggccctgccggcctcctcttacgttagctcagtttctgcctcaatcagttcatcaaaatccctttgggttccttgactacatttttacttttgaaacacgtctatcacaaaaagaattttccagtgtcttggagctatcttcctgtcaaataagatagaattagagaataactgtaagggtcatctacaacatccctctcaacccattctgtgcacaggcaccttgttcactggcatttctgtcaccgtaggtctggggcacatcctgacagcaggcattcctaacaagctctcaggcgatgccattgcggctggttcccaggccacgctgagcagcgtgaatgtagaccagtgtttcccaactttccccaatgatatgaatcacctgggcactaaaaaataaagcttcccagactcctcccctggagattcgaattcagcgggtcaaggacagatcctaaagatttttcttttcaacaagtacccgggctaattcatctcttcagaaaactggggcaacactgacggagtccaacaccttcctctcaagagaatatcacaggtgtggcccagcaccgccagggaaagagcttcccctaccttgccgtaccttctcccctcgctttcttccctggaagccatagagagcaaatcaaacacatcagctatctgaagacagtctgcaggagactgtgagccccttgagggcagaagttgtaatgtatttttaggttttgttatgtggttattttaggtttctcattttaaagatattttataagagtataaaagcagtgcaacaatgcaaagatatgtaaagagaaagctggtcatccgtctccccgcacccaccttcttccccaccccagcgacccgaagtgaagattggtaacagcctggcaacgttattccttcgaacatagacaagcatttatccacactcaaggcttttgtttgcttgttgttttcaccaaagtggaaccatcgtatatatattactctacaacttgctcaacttgcttgctttttgtttctgtttttgcttctttttttttttttttttttttttttttgtcttagtgacttattcgtatccttacatgctaaaagatatggatcttttttctaatttccttttttttttttttttttttttttgagagaaatctcgctcttatcccccaggtttgagtgcaatggctcgatctcggctcactgcaacctccgcctcctgggttcaaacgattctcctgcctctgcctcccaagtagctgggattaagtcgcctgctaccacaccaggctaatttttgtattttttagtagagatggggtttcaccatgttggccaggctggtttcaaactcctgaccgcaagtgatgcgcccacctcagcctcccaaagtgctgggattacaggcgtgagccactgctcccagcccttttttctaatttctgtatgcctattatacaatatttttttataaatagaagtatacatgctggaggggttagtgcaatctttttcctcctcttgttacttgggtcaatgccctctcccctgacccatgttcataaccaggagtgtaattctgaagtttttctatagtcatatatactaccatatacagacatccccaaagagaagggacttgttactgtttcacaaacatgtaattatacattcttttcagcaaattgatttccttactcaacaatatgagctgaaatatttctgggtcaattggtacagatcttattattttttaatttttttcttaattttttagaactccagtctgttgtccagactggagatcagtggccctatcacagctccctgcaacctcaaactcctggcctcaaacaaaatgcttggattacaggtgtgagccacagtacccagcctcactacttttgatgattgcataatattccccattgtagacagaaccttaatttattgtcagtctcatactgatgtgccttcacttttctccagctttttgcctttctgaaaagtgctgcatttaacatccttatacatgtattctcatatacctatttgtgggaaatatttctagtagtataattttttttttttttttttgagacagagtctcgctctgtcaccaggctggagtgcagtggtacaatcttggctcactgcaacttccacctcccaggttgaagtgattctcctgcctcagcctcccgattagctgggactacagacgcatgccaccatgcttggctaattttttctatttttagtagagacggggtttcaccatattagccaggatggtctccatctcctaacctcgtgatccacccacctcggcctcccaaagtgctgggattacaggcgtaagccaccgccaccgtgcccggcccttttttttttttttttttttttttttttttttttttttttgagatggagtctcgctcttttgcccaggctgaagtgaagtggcgtgatctcggctcactgcaacctccacctcgcgggttcaagcgattctcctgccttagcctcccgagtagctgggactacaggcaccgccaccgtacccggctaatttttttttgtatttttatatttttagtagagacggagtttcaccatgttagtcaggctggtctcgaactcctgacctcaggtgatccgcccgcctcggcctcccaaagtgctgggatagtagtagaattttttaagtcaaatgatatatatttttaaattgaatagatgttgccacattgctttcctaaaacattatcacaatttgcacttccaccagcagtgtatgaacacctatttcccactccctacttctttccaaggcagaaatatttattgctcattttagtttttgctagtctgctgggtgcaagttgtgacttcattgtgactttacatttccctgcctactgctgagattgagaatctttgcatatgtttattgaatttgctttactgtgaattaattgttcaaatcccattttcttttagaacgcttctgtttcttgccagtttgtaagaactacatattttatgacatatagtaaccttttattgttcagcttctttgcaaataactttctaagttaatttctctattgattttagctacgggttattttattttattttattttattttattattttattgaaacagagtcttgctccatctcccaggctggagtgcagtggcatgatctcagctcactgcaacctacctcgcgggttcaaggttattctcctgcctcagcctcccgagtagctgggattacaggcatgcaccaccacctctggctaatttttgtatttttggtggagacggggtttcaccatgttgcccaggctggtctcaaattcctggcctttagtgagccgcccacctcggccacccaaagtgctgggattacaggcaagagccaccccacccagccttgattttagttatagtattctttgctgtacagtagtttaatttcctttaggtcaaaaaaaatctaacatttctattatatggaatttctgacttgaagtcaccattgaaatgcaaattgttgaaaataaatattttcttctgagatttttggttttgttccttaaaagccttaatccatctgagatttatttttgtatatagtgtgagatagaatgacaacttaattttcttctatatggatacaagtggagccaacgttatttattaaactttttcatgctgaattgagatcccacttgtatcataaatttaaagtacatgtgaactatttcttaatcctctgttttgccgcattgatctctttatttctatttctcattatttctattgtaatcacacttaattgattgcaagcatctagtctttcatacagactttacagtaatttcccaaaaatctctatttcccaaaaatcaaatattctaattgggtggcacatgaaatatagaaattagtacaaatgccaggtgcagtggctcacacttgtaatcccagcactttgggaggccgaggcgagtggatcacgaggtcaggagatcgagaccatcctggccaacatggagaaaccccatctctactaaaaatacaaaaaattagccaggtgtggtggcgggcgcctgtagttccagctactcgggaggctgaggcaggagaatgatgtaaacccggaaggtggagcttgcactgagcggagattgcacccctgcactccagcctgggcgacagagcgagactctgtctcaaaaaaaaaaaaaagaaattagtaaaaaaagaaccaacttttttattatgtcatccagagggacattgtatgtttttcatttgtttgggtcttgtttcatatccttcaataaaagttcatgtttttttttttttcctaagtattttaattttttgtcacgagtgtgatggaacccttcattccattccatttctatctcatagggcttattactagtataaagaacagcttttggttgtttattctatatttgtccaccttatccaattaatgatattaattctatttgttcttttttatactagaattttacgttgtacaaccacttcgtcaccaacaaccacagtttatattgtttatttcattttttttcacctttctggcaacccaagttgacctcaagtgatccacctgcctcggcctcccaaagtgctgggattacagccatgagccactatgctgggcctcttccttctttattcatagattacaatatgttgatagacttcctgatattgagccacattgcattttttttttttttttttgagacagagtcttgcctgttgcccaggctggagtgcagtggcacgatctctgttcactgaaacctctgcctcccaggttcaagtgattctcctacctcagccacccaagtagctgggactacaggcacccaccaccacgcccggctaatttttgtatttttagtagagacagggtttcaccatgttggccaggatggtctcgatctctcgacctcgtgatcctcccaccttggcctctcaaagtgctcggattataggtgtgagccaccgcgcccggcccgtgtttgcattcgtggagtaaaccttccttgcttaccatgtatttttttttttttttcataactttgctggactttccttgattttatttagaattttgcctttattttcataagtgaaatttttgtttttgtttttgtttttggagagtcctgctctgtcacccaggctgcagtgcggtggcacaatcttagctcattgcaacctccacctcctgggttcaagcgattcttgtgcctcagcctcttgagtagctgggattacaggcaccagccacaaggcccagctaatttttgtatttttagtagggatggggttttgccatgttggccatgctggtatcaaactcctggcctcaagtgatccgccccacaaagtgctgattacaggcgtgagccacctcgcccggcctcatacatgaaattgatccacgccttttttagggggtctatcatttcatgcttttgatattctacagcttttatctatggccttgaatagtttagataatattgtgatgatctttttttaaaaaatctttttaaaactcagctgtgaaaccatctggtccttgtgcttttgcatgtaatattcttagattttcagcttgtacttgccttttgcatataacatttattaaaattatttttgtgaaatatcttcaagcaagagaggcacaaagttatataagagcataataatgagtaaatgaagacataaccttaaagcacagacaaaaaatccaaaagtaaactctgaaattctaataattcttcctagggtagttgaatcaatggacgcatttatcacagaaaacaagataaactacagaaatgctacatagtgttctatccaacattaaatctagacataatccacaaaagggaaaaaactgaaaagctaaatagttaactgtcaagagaaactatgttggacaatgataatattcctcctaatttctagtaatattctccttaagagcatacttaaatggtatccgtttagaaagcacatttagaataactttaagtttgttcaattcttgggtaattggtaggttcattccctgactggttgatgatcacaaaatagcccacgtttgtctgttttctaccttataccctgacattcattttcttttttcttggagtctagctctgtcgcccaggctggattgcaatggcgtgatctcggctcactgcaacctctgcctcctaggttcaagcagttctcctgcctcagcctccccagtagctgggactgcaagtgcgcaccaccatgcctggctaatttttgtattttcttttttttttcttttttcttttctttttttttttttttgagacagagtttctctcttgttgcccaggctggagtgcgatggcgcaatctcggctcactgaaacctccgcctcccgggttcaagtgattctcctgcctcagcctccagagtagctgggattacaggcatgtgccaccacgcacagctcattttgtatttttagtagagatggagtttctccatgttggtcaggctggtctcaaactcccgacctcaggtgatccacccacctcggcctcccaaagtgctaggattacaggcgtgagccactgcacctggcctaatttttgtattttcagtagagaccgagttttgccatgttgcccaggctggtctcaaactcctgatctcaaatgatcctcccacttcagcctcccaaagtattgggattacaggcatgagccactgcacccggccaaccctgacattctaaatgaaataagatgtacagatagtcttattactatttatgtttttcattaatgacatacaatgacatgtgtgggcccataaaataggctaattgatttaggaatataaaacaaggtaagagatctaatgcactttttaaaaaatgagttgctaaaaacaaacatttagtgggtaacagtaagttgtttttgtaagacctcttttggctccactatcttctaggctgggataaaagtagtaaaattcaaagaccacagtaagtataaattacatctaggttactatgagttttgttaatttaaaaaaaaaagaagaggagggagagaaggaagaggaaaaggaaggaaggaagaagaaagaaggggaagaggaagaaaggaggaggaggaggaggaagaggagggagaagaggaagaaaaaaaagaagaaaattctttttttctccccaggagggaagcttttacttttatagtcagccagaactagggtgagagaagcaaggcacataggtcacacaattcaaggaagcgatactgtacaagtgccagctgctcccttaacccatgtgtgaaatcgggtgcttcctacggagtggggtgcctgggtgccagggctggcacttgcacaaccttattttcttaaattttgtgccctaggcacctcacttgcctctctgtagttccagttctgtttatattaattccttcttcatattttcttttgctttattttattctttccatggaacttgttccatagaaaagcaactagtacttttatttttagtcattgttctttaatgataatagtatgtaaggctgtaatatacagattttaatataaagccttcttttcactgtagttttttagtattagctttatattgctctttgctccaaagattacccaggaagtattcttcaatttataaataggctattctgatcacttttaaattatttatttctagttttattgaatgtggctacaaaaatctctcatttctgtatttgctaagcctttctttgtgatcaagtacatagtcaatttttataacattctgttggatatgtgaaaaaattctatgttttacttgagaaatttaagatcatatatctattaaactaagtgtgttgactgtattattcttctatagcctttttttgtatattagatgtgattcttaaaagtgttttaaaatctctattttgatcaaattatatttgtatttacattgtttggtacacataagtttactaatgttaattctgcctcacaaaatgtgccttacattgttagataacattcctcctttagtgcccccaatctttaattcctccttgtctgacaattaattttgctaatcctattttctttttcacaatattttcttgatatctttgttcatttctttattttcaacttttctttatactttgtttctttaaaaattttagatatttttcttctagataaagtatagctggcttatttatatttttaactcaatctaagtgtctctgacttctaataagaaaatctattccatttacatttagtgaaatgattggactcttactatcttatttattgccttactttactaattattttctccttttatgtactcttatttttgcagattgatcaaattgatagttcccctttccatcttgttgatacaacttttcttgtagattttcattctacttccagctagtttccctttcctgttgctcataatcagatacatatttctttaccattatataaaaccagacacatacttctcccaccaaatactgtttgtccactgcttccactccccattccaaactttagaatactttcacttcccctaccagttgcacagctactacccagatgagaactttggaacatttccctccttcccacccacctccgatgcccagatttgctgagattcacttattatttttagcaccagactgtttttagaagagtcgtcaaggcagatggtgatgtgatcaactcaggaaaagaatagacttttacagagtggaggacccagtaacattcacaatccgagggatgagcttctgtgggctttagtgtccaggagctggtaatacattttgacttgggtgatgatcccctttactattattctaagattttatattctgatccttcccaactctactggagactttgacagtttattttatcaccaagcaaaaggaactgataacatattcttggatacttttttaagagcggactgaagatactggagagccaagctgcaggtctgcctaggttgatttccgtatagtccttttccctccgtggttggcagttttccatattgtcacttccagtgttgtaagtaagcagtccattgccaggatgactctttcttctttaggagtaacttgttcttccctgtagagacttttaagattgttctctactcttgtagctcagagatacaatatgcctagaagcgtgtcttctgatcatcattccttcctggaactctcttttatgttgttgtttttatttttcagaggcaggatctcactttgttatccaggctggtctcaaactcctggcctcaagctatcctcccatttttgcctcccccacatgctgggattataggcatgacccaccacgcccagctcctagaactctgagaggccagtctctctcttcatctcagaaaccttttaaatattttcgctcacatctctcttctgttacatccttcacctccgttctggatttttactatctccttgtaatcttgctctgtgctttcagatgtctttctctgacactaattcagacatcaacagtgaccactttctccttcgatttatctcttgaaagctctggttcaaaatcatccttttttggttccagagaatcagttttattgtgctgcacttatgtctccttttcttattctttggttcaagttatctatgtcagcagctatttctgtactgagggttctgcttgtaattctccctggctactggactccattaggaatcttcttttcctttgtttgatcactggggctctgttccagatactgaggtaccttaagagacagcattcgcagcctgatagaaggaacagcagtatcagcctcccaggctcaagcttagcagcatgtgggttgccagtcctctggcaagggacttgaaggaagcctctctgccccctttctagtctcctcacctctctcagacaccttcatagcagtgaaggcaactcaacccatctggtcagctcttcaagaagcagggagacccacacattcacgaggaccttgccccggatcccctccttaggcttatgatatggttcccaggcaggaagacaatcttgccccagctctctgacaggattctgctgtggcccgaagcctcattcacatcccaggccttatcttcccccggcaagccccagcagctgcttttctcaggagaggcaaatgggttaaactgcaagtagaaaaaagttcaagctgctatcattccagaacccccagttcctcatgtctcggaacttcttgatgtctttatttttgcattctaaagtgcttaataaacatcactgaatacatgctaccacccctacctcaaatcctgtctggtgcaggttcaatcaatcatgatgcctttggaagctaactcaaactggcttaaataaagagggttttttgtttggttggttttgttttgtttttaaatctcacacaaaaggaagttccaaggtagagtggggcctcaggaagagctgactgggctgcttggtaatgttatgaagatgcagtgtttttccttctctctgctccaccatccttgatgttggcttcatcctcaggctgttaccaagttgcccactgcaactgcaggcagctcactcaggcatggtaacatccagagaaggaacagtagacatcatgcgggagacagccctcttatctcactggccaaaattaggtgacatgaccattcctaaacttggcaagggtaatgagattaaccacagaccaaggaccctaaccacatgtctgttagaggagaagatacttaaaatcaggggacacctgctcgcaagctaaatgttccagttcagtaagcagtttttcacatgaaaaccagaacagttgacattcgagtgttcaccatatgcaaggtgccttacatacattctcctttaatccacatcatagtcccctgaggtggctaaaactattatccctgtttcacagatgaggtacctacagcttagcttttacaaggtcacacggctaatggaccatcatttccctctttatagattctgtgtccatgaatgcagcctaccattgcagtcagcaacagaaaatgtcctttacatattaactcccttggaccccatgtgagagctataattaggtattgtactttaagacactgtcttttcatgttatggagcttggtaaccagctataagtgcaaatcattcatggcagaccactagctgtgccctccctgctgccgctgagactgtgcagaggcatgtggctatgctgtggagtttcacctttgattatacaacatgcccaggaatcctttttataaaacaagccttaagatcttaatatggggccgggcacagtgtctcacgcctgtaatcccagcactttggaaggcccaggcaggtggatcacaaggtcaggagttcaagaccagcctggccaagatagtgaaacccccgtctctactaaaaatacaaaaattagccgggcatggtggtgcaggcctgtagtcccagctacttgggaggctgaggcaggaaaatcggttgaacccaggaggtgaaggttgcagtgagctgagatcacaccactgcactccagcttggacaaaagagtgagactttgtctcaaaaaaaaaaaaaaaaaaaaaaatcttaatatggaacagccaagccttacatatgaaacactcgacttacacatttattttgtagatttccctaggaactaacatttatctaggaaatcaagtaagtattttctactcccttctacatatgaaactctttgcattggtggctctgcagtgagtgtgtgtgtgtgtgtgtgtgtgtgtgtgtgtgtatcagtggttttcccattataaaacatttgaggcagaaggtatctgaagttctattcaacccttcttctgtcctcccacccttaagataaccacgttaactgtgtagtgtatttctatagactcttttgcagcgcattttttatttaaagtttttattatggaaatattcaaatacacataaaagtagagaagaatacaatgaaacccaacatgcccatcacccaacttcaacaatcaacattggcaatgcattgtaacatagttgacatcctaatatatttagtgattttaaaaattatttattacgaaaagaatccggttcattaaaaattcaagcagtgcagaagagtgaagtaaaaaataaaaatcttcttactctcccaaggcccttaatcccagtgctcagaaataacttaacagcttttaatgtatcaatctagagattttctctgaataaattatacatttttacaaatgtaaaaaattttcacacaagaaatcagaccatacatatatattaatacttgcttcttccacttagtacttcttggacttctttagaagcaaatacctgcaggtagcctgcattcttcaatggttgcagagtgtttcactggaaagcaaacttaacccaggaacgaagggagggcgacagctagttggcttgtaagtagactctatctcaaaagccagaggcttacaaagtggattgtgtacacagtagggagtgcaaaatgcctactggaatgtgggaagaaatatgatctccgttcatttttctcttatccctcaaaattgtggcatactttaaaacatcatcatagtgcagtaacacagtcatattatttatacatatttccatattaggagtgtgtactcaagatttttaagtgtaagatacaagatcaaaaaacttggagacaagctggatgcgatggttcatgccctttgggaggccaaggtgggaggatcacttgaggccaggagtttgagatcagcctgggcaaaacagcaagacacccgtttctacaaatttttttaattttagctgggcgtggtggcatgtgcctgtaatcccaactgtgggaggtttgcttgagcccagagggtgtaggctccagtgggctatgatggtgccactgcactccagcctggtctacagaaaacctatttcaaaaaaaaaaaaaaaaagttggagaccactgtgcaaagcaattctgatgagtgccacagagagcagagttgcttgtaagggtgagggagtaggctaaccagcctgtcctgagaacctctgcaaccccattgtcagtgccaagtgtcataacagatgtggaagtcccagcccagtgagaattccttaggtaaggagaacctgtccccagcagggcacactacagtaccagctatccaagaagtaacacccagcgtgttctgcagaactcaagactctttaggggagaaaacagcagaagagtttactagtttgggagcactgcatattataagatgcttttacagatcacaatcagtgctagcatactagaggctctcagaaatacctcattttttaaaaaatcaatcaacagaacaaaataaaaacccgtgtaactctgcatttccatttgaccctggaatttatacctcctgttttttcctgaatatttgtctaaaaacctgttattaaaaaaaaaaaaaaaatactagatttctgtgaaaaaacagaaaatgttaatctggaagtttactgcaggaaaataccttcaaaacgtttaacttccacctttcactatgaaatagccaaataaacattacatcaatgatttagctaaagaaaacattcatccacaaacacaaatctagagtctcccattttatttctaatttgagctttctgaatacatttcttctcctatcaggagttgttacttacatgccccaaagctaagttatgcctttcccatttttgcaaaacatggtcggtatgtttcatattctataaatacagtgcatattagattttgaaagaaaatttatctccaggtatgacggaaggaggttgtgctgccacaggatttagaatgagatatgttaaaagttaaaaatacagctgttggtaatgtgttgtaatgaaactaacttttgtgcctatcttgtgaaatcagcttcattgcctatttacaaagcacacaacaaaacaaatgtttattgaacacctactatagccaagctcaaggaaatggagattaataaagcccagtcctgcagaggaatcgagggaaagggcaatccagggaataggaaaagcacatccagagtcatgaaaatagcaaagaacatgacgacagtcaactgccccatggttacatcatttctaaaagcttgtgacagcagcttggactagttagagcaaacttttaccgaaactccaaaactcaggtccagcttttctcctctgggaagtcatcttggctcttcccactacctacctaccatgctcgatatgcacttcctctgagctaccagggcatcctgtgtttgtagagtttccaacacaaacccctctgtactgtaactgctggtttctttccttccgctagaccctcagctccctgaaggcacagactgcagtcctttgggggctgtgaaaaattgcagcaggttgataagtgaatgggagctgaagtagccactgagtgtaaatgattctctcgaaagtttggcttagatgaggcaggattatattgtaatatggtgtgtgctatgagagaaagatgtataaaattccagggcacagcaggtcacatggacacctcattcatcctggtaggaggctaggtgtcttaatcctaaatttatgatagtcatgatacagacgcccaggtctgaaaagcgaagcgcctttcacaactcccagattgttgggccaatatcctaaggagaataaccaagtatgacacctgccaaagtacaagccagctcttcagcaaatgaatgcaatgcaaagcaaaaaatgaaaaaacatttaaaaaaataaaggaatctgaatgactaggctgacatacctttccccaaagaaaaatcagctatcagtgcccagtatataaccaatcgacattattaaaaattctatgtaatctatttaaactctcttcatccatcatattttgactcaagcatcactttcataaggaattctctgaccttcctgatgtcccaccctcctttctcagtcctatctctgcattatcagctgtgacaacgtcccaccctcctttctcagtcctatctctgcatgatcagctcttggatcaccaaaaacctcctcctcagcatgtatcacagctggaattgtacatttattcacatgattatctgatatctatctcacctacaagaccatacgcttcaccagggcagggaaactgttaagttcactactgtattcttatcatctagccaaggccctggcacaatcaagtgcctaagaagtatctgtgagtaaggtaactggtcaatgcatatcagcaaatgcataccataaaagccaaagaatttcaaacatgctctgatatgtttcaaggaggaggaaaggaggagaaagaggaaaatggttaacaggtcacttcacttaattacagatgctactagcagatacttaagaaaaatgaaaactaaccacaatcacaaaactaaataatgaagaatatattgacaccttaatttataaaaaccggcctgttgtatttagaaacacaaaggctaactcccatacccaaagggcaagggaagaaaacgataataaaatattcatttaaaataaagaataaaattgcttaatgtgttcagtataaccacatagccttcatttttccaaaatgatttttctaaaattcatgcaaatggaaccactttttatataagacaacctacactcttatcaaattattctcatttttttacactgagaacaaacaactacagaatatctttttaaagatctatttccacctccagggaacatgatcatttaaacaagagagggcagaagaatctagtttattgtagtgagctacttaacatttactccaacgtgggacacacaggcttaatgtggataagctgaccatactccttgacatgtttaacagagaacaaatattttacttaagtagttagctaagcccttcaacagtgagagagagagagagagacagagcaaacagggacccaatggcctgcttgctaagattgctggatgactgatagcttcaagagttcaccctagcagttgaaatcaattaattattcattgtaactggagcagaatataattatgttagcttgactggttcaagtttaattccactaaaacaatcattatgaaaatcattatgaatacaggtcattatcatgaattactgctaaaataaaaacagtaatgaatcagcttctataggaatttgattcacatttaaaacactttttttttttctttgagatggagtctcactattttgcccaggctggtctctaactcctgagctcaagtgatcctcccaccttggcctcccaaagtgttgggattacaggtatgagccatcacaactggccacattttaaaacttctatgaaaaatttcaaatataaacacaggtagagaaaatagtataataaatccccaagtgcccatcacccagcttcaataattatcaactcacagccaatcttgtttcaactatatccacacacaccagccaacttcaatccttatttttaagcaaaaacttatacatcgtatcatttcattttttaagtgtttcaatttgcatctctaaaaggggtcctttaaaaaatgtaacaataccattatcacacctaaaaataattaaaaaccttaatatcaaatatccacttttcacatttttccaatggtctcaacagtttgttcaaatcagtatccaaataagtccataaattgtcttgatagatgtagctcttaagtctcctttaacccatcgttgtcttttctctttgcatttctgttgttgaagcaggaccatatgtcttgtagttttccagagtctggattttgctgattgagtcccttgtatattatttgtccctctgtcccctgtatttctaatgaaggggtagttagatcaggaggcttcatcatgatgagatgtgacttttggcagaactgcttcataggtggtatatgtacttccattaggaggcacaaaatctgattgctctcactttgtgaggttagcagtcactggcgattattgtctagatccataaattgttgggggggtaaaatggtgatatcctaattctatcatttctcttattacctggaatttctttaaaagcgtatcccaaaggtaactataattctgtccactaccatcattaactcacagagttaaatacaatactatgagtttcaatctcttgcagatattatccttgctgatgctaaagttatctcagccttggccagtggtaacttctaaggtgcctcctgaatctttctgatctggtacaaaacaatgtttcctaggttcttcttgtacatttctttcttacaggtggaattagtgatttatccaaaggagtctggttcccttgaagaaaaatggtacttaagagaccacaattagggcactcaatttgacttgcatttgaattatgtctaaagctaatcaactgaattaagcatgagtcttctattattgtttctaatacattcatgtggctgcatatatgtggatttctaaggatgggactctgatttaatatatatatatatatatattaaatcgtggtagtataacttggtacatctatctgggagacagtaccataatttttatcaatgtccctcaaaaaacctttaccccaacaattccacttttaggaattaatttcattattaggctgaggattttcctaagaattgtttaaaattctttagaattgtttaaaataataaacaatgtggaacctacatgtccaaacaatgggaaattggttaagaaaaaaaaaaacatacatccacagaaatatttagagtagttaatgtgatatacattatcaatgtaccattaaatgagaaaggtgggttacaaaagtgtgcatattatgtttttgtcacacacatagaaaaaaagtaacaaaggccaggtactcaaattttttttttttttttttttttttttttttttttttttttttttttttgagacagagtctcgctctgtcacccaggctggagtgcaatggcgcaatcgcggctcactgcagcctctgcctcctgggttcaagcaaatctcctgcctctgcctcccgggttcaagcaaatctcctgcctctgcctcccgagtagctgggattacaagcatgtgccaccacgcccagctgtatttttagtagagacggggtttcaccatgttggccagggtggtctcgaactcctgacctcaagtgatccacccgccttggcctcccaaagtgctgggattacaggtgtgagccaccgcacccagccctgccaggtacccaaatcttaccagtgcaaactacaccattctgttgtgttcccactgctggtttaggatttgacttccctgggtctgcccaatcaatagtactccttcatctgcttccagatttcgttcttgttcaattcaccttgtccttgttggattaccccacaccctatcactttagtgtagatttcaggaaaaagcaaaaactaatcagtattttgctcaatgctccgttttacctagcatcctgttgctttttatagaagagatgctctgaagaacttaccaattataaaatacatgaatttctactgaaaatagtacatacatgtatatatctaagacacacaaacaatatagtaatataaaacagaagggctaaatttctatcctaatcatataaagagttgaatacagaaacaatagtgaaaaaactaaactggtaataaacggaaaagtatatcaaatggaagttgtttttaatcaagaacacaacatgagagatgctgaaactgaagttgtcctctgtggggcaaaccaattgtctttctagtttctaagaagttgaaagtggttttggggaaactaaaatttcttacaactttagtgacttctctaaagatgaactgtccctggcagctgctttaaaactacatctggcttgcaccctggttttgggaaaccttgaccctttaaatatggataatgaatatctcttcttgtactcctccaggtgaactgtccaggtttgtaatgcttgacactctgataccttcaattagaaatacttaataagaaatgccttctcatgcacaagccccgaaatttcatagttgccaaggacaccaatcccatctttaagaaataataataattaggtcttactacagggacaaatacaaggactgagggtcgagtagtttgctccgcttggacaaatcagatttcactatcctaagactgtgacaaacacgaagtacccaaagcataaagtgttgaagacacctcacaaaacaagactgatcagagaaagttgtcatttccttaaataaatgcttccccaaactgcatgacattgcttgacactacagggaatgctaaatccagaagcagtcaataaatttattttatttctgattttgtttgtgaattggtacctgaatttataaaactggggagggagggatggagggagagaggacggactgtaaacagaatttaagcattcaattacaagtaaaaataactaatttataattacccaaatcaatcaatattgagagtttcataaataactaaacataatatacatttgatgctcctaaattaacaaagtaattcacaaagtattacatatttactcatttaacaagtattacttatagctaaccttgactaaaaaaagaatttgaagcagattacctcatgcagggaattattctgggcttacaattccttttctaggtaacactgaaatgtcaattctctccttatttgctatgaagagaaaaatgatggctcaaaattttaaacaaacttatcattaaactaggctttttaaaataaatgaggtacttagcattcaaaactttgaaaaacacataaaaacaagaccataagttttcaaaatgactcacctcttccaccaagacaagcactgaatattgattagaaacaatgtaatgcagttgagattagttgggtgttttaaaaaggtttattgtgtgtacgcagagtatctaactggaaattttctacatggattccaaagtattaagaataaagataatctatacttttgtaggaagagacaactgtaagaaaacactgccttgtgggaagcttcttgtgatagttctcagagttcaaagagtatagaaccttcaagttgatttaatcgtctatttattaatgcatttcaagtttcaaaaaaccttacatctttgcacaatactttattttttgcaatttttagtaaaaatttccaaagtgaacaaaaaaagatactgtataaaacacagtggacattaaaactgacagtagtattagatctcatttgtcttgatccttttatattaccacatcttgattcgcagtggaaagagttcagtgcatgtatctcttttcagaaaacatttaacttagactcaaaataaaatagggcagtgtgtgtacctgccaaaatcctaccacaggataacattacaagcaaaaaatttacatgttccaaagtctaccacactcaagaagttactaagaactcttgcagaataaaagtcaccattttagaaatgcaaacccacttccaacctttgcacagtccaaaaacaaaggcatttaaatgatttaaaagcaattacatacatatctacctacttgtttgtttagaattatttatagtctatctggggtttcatgtacaaaatttgtctctaaatcatgtacaaaaagctgtattttgaaaaagtcaccacatactgtacaagtttacaaggaagagatcccgttattttctctagcatttttggccttgctggcttgcgtcacattatgagaatgattgtgtaaaccttatactcttaaaaaaaaaaaggaaaaaaaaaaacccaaaacatagaaatctttacaactttctctaaatttgcctcctatgtgaagtcaggaaaatcatagctttacttctagttgaagtgatgtagttggaaaacagaagcaataaatatgtcacaagcttcaatttttgtaatgccccttctatttcctgcatagcaataagcctgttaatacattaaatgtttttgctttctctttaaaatgccaattatttacatctgtttcaaaaataaatttggaatgggacattgtgctgtttcaccttcaatgctgttaaaaattttaggaaaaaaaatgtcagaaggcctatctacaattttaactactacttaagcaaattactcatctttagtggttaccaatgatcagtgatgatatgctgaaaaaaccgtttaaatattttgataaagacacagcttttcttttccatatcagacagaaaacataattagcatatttcagatatatgaaaaacacaaataagtaggctacaaataaaaagaatcatttcattgacataatttctatcaaagcatgaataaaatttcacctattaattgaaaaatggaattgaattagaaagtttaaaagacgtaagcagaaaccagacatctacatcatgaactctgaagtagtatgtgctgctatgtccagtttgcacaacacttaactgtgttcttcagtatagtcacttgtgcccgtagcagccatgtgataaagaaaaaatgagtatcaaaaccaactccatcgtaacagaaaggtaaattgattttcatttcaaaactgcctgtgtaaagcattacagaatcctggaccactgaataccaccattctctgttatcctgagtatgtcaattaaacagtaatttttaattaagagcggaaaaattttataatacaaagaaacatccatattgcaatttctgtttacaattgcacacagaagtacagtgtacgtaagaaatacatgtctgcatataacaaggtatgtacattggcaagtgatgtctccaatgttgaggtggtcgagcctcctagccttgattggcagttgaaaaaaatatatttatttcaatttgtggtaaaagtttattgagagccaagtttgcctgcaagtgaagaaaatgcagcaacgaagaacagggaacacggggcacataataatattctaagactttgtgccattaagttaaaaatatctgttcataagaaaattgggttccttttccacctcccacccccaaattggaattttcaggctttaaaatttaagtaattccacctggtctgaggatatgatctcttgccattttttcttcaactgttacttgtgagggtttagtttggagatgatgacttaataggtttctctttggagtgaagttttcccattgtaggcactaggaagaaccaaggcaaaagctgcagttagcgtctcatgtgtcccatttgataactctctcggggccgctgacgctggggttgctgaatgggctgtggaggtctcctcctctttaaagtgcctgtgagccacaaataaaagcaaagcagatttatttatcatgagctttttaatctttaaaagcaaagctgctgtttcaataagaaaggttttagttcagtgctgtccaataatatgggccatcaatgtaatttaaaatcttctgatagccacaataaaaaaggtttaaaaggtgaaataattttaataatattttttattttatttaaattaatatagccaaagtgttatcatttcaatatataatcaatacaaaaattactaacaaaatatttctttttttatactaaatcttcaaagtctggtatgtatgttaattaaaacagcacatttcaatggaaactagcaacaattcagtgctcagcagccacaagtattagattaatccagattaatatcacagattctggacagaatccatatgagggaattactaagtgtctttgagcaaatgccttaacctgagactcagatgcctacactgtaaaacaaggatgataattaacgtatatagcctgttgtaaagattatataattcatataaaaatgtttaacactttttgtgagggttcaataaatgacagctagttttctaagtttttaaaggtgctattcacttaaaatgaaaccaacatacacataaaatgtttcactgaataagaccacaattggtaacagcatctaaaaagtgtcatgtggcccttagaacttccttaaatactaacataagttccagagtgctaactaacattgtgaacttaagaaaagcaatgatataaaaatcaaatttcctctaactctcactaagatactgtcctagcatgactactgggccatcttgccccagacaggtaaatgcaggtgaacaactgagggaaaacagagaaaaagtgtaagaaacctagttttgaactactttgtataaggtagtggatttgcctgaggcaagacatcttatgagaagtctgagagcggcaggagagggaactgctgtcatttagttctggctctcccctgctgctgccctgagacaatgtctgtcctcacacctgtagagaatagctacgaataccttggagaaggggagggataaacagagggaactaaacaatacgaagggtttatttcctgtccttttctccttccaatgcccacagctcatctaaagagggttcttcctcatgctatgtctccctgagaggtaaaaggtggagaccagaactaaagagttgttttcaggaatggagaatacttgactgtgcttatttgatgaatgaatcctctactctaagactttcccacagactgggatctgtatgtccccacaagcatcaccctgggggaaaataagcttatgtgccagaaaatatttcaagagcacaaacactaaaaacgataagagagctgggtgcagtgcacgcgcctatagtcccagctacttaggaggctaaagtggggaggattgcttgagctcaggagtaagtccagcctgggcaacacagtgagagaaagaaaaaagaaaaagaaggaagggagggcgggagggagggaagatggaagggaaggaaggaggaatgaaggacaacaatatgagaagcacaactattagaatagaaagatcaacaattttaaagtagttcaccataatcatggcaagggaatatgttagaatatatttaaaaaaaaaaaaacaagaaaacaaataccaagcaaaatttaaaatttctagttctaaatattttcagacactcagataaattagcattaacttagcagtcactggccagattggattgacaaaaagcacacaaatatcaactaaatcattcatccaataatcccattcttacggagaaagtactgtaacattagttactacagactcatttataattcaattctacctgctaaacaattctgagttacataaatatgtatcttgctcaaatattcttacctggaagtggtttaggaggaggcaactttggattactacttggagtatgaacactgcatatcttaataaatccagccattagcatgatcagagcaattcccataagtaatactgcccaccaatgagcctagaaataaacagatttttccactgaaaaaaaaaaaactacaaaatattttagagtatcttttacagtatataaaacatagaatagaacacagtatattgtaatttttaaagaacatttgtttaggagttgtatacatatgttagatatttgcacatatatattatttaaatataaaaaaaagtttaaaggagaaaatggaaatcacccataatttcatctcatagaggaaaccgctcaatctgattttttttagtctctttacatataacaacatttgtcatacacatgaacacaaatacaaaactggggtcatcttgcatatagttatattgcattttcccatgttattaaatattttctggtttaaatattgcctttgttttttccccttactcttttttctccctcaaatggataatgtgccaatgccctaacaaggtttgaggaaggcacatctcacatatgagtgtgcaaacccaatcatcacacttatgaactacaaaaggatctcctcttactcttatagactatgttttgattgcgtttatactttccatggcttagaaagcatgtaacttgctttaaattctactagtgaatagatttaaaaattactctttaacctacattgctttctaattatcaaagttaagactgaaattctatctctttgagacacccttttcctcttttatttcatttggaatttgagactcggactagttatgaaattactttttatatacattagttttcattacattatatataatatctttattgtattcattagtttataggctatctttttaaatatgaaaagtggaagaagatacatattttagcagcaggcaaagttcatcccgtcttagaagaaaccaaaacttctattttaacctgacctatattaaacaaatcaattagccaaacagaaaaaccttcaaaaattattgataaatttataggaaaattactgtgtctagtcttaaattatattttgcaattccaaatattcaaactttgttttaagaccacatgtactaataaacatcatacaaaatatttacagcttcaaaactgaacctttacatttatttaacacaggttactgtaacatatataattactactaatagtttccagcaaaactcccatttaagaagactgtctatgacttagggacttacaacaaactgggtactacttctacactgtttagtttttccagcagtgtttatataattaaagtaatactaatgctaattttagcattaatgagagtaatgctaaaattaaaaggcatgttgtagcaaaatatcccaagccactttttctttgtgtacacaaagcctttcctactttctaaacatttgttttattttgaaagagtctcaaacttaaagaaaagttgcaagtacaattcaaaagttccaagtaccttttaaaaacctgaggccgggcacggtggctcccaggtggctcccagcactttgggaggccggggcgggtggatcacctgaggtcaggagttcgagactagccaggcccacatggtgaaaccccgtctctactaaaaatacaaaaattagccaggaatgatggtgggtgcctgtaattccactattaaggaggctgaggggggagaatcgcttgaaccagggaggcagaggttacagtgagccgagattgtgccactgcactccagcctgggcaacagagtgagactccacctcaaataaacaaacaaacaaaaacaaaaaagaaaaacttttaaaaatctggaagcacctcagagtaagttgctagcaccatgctgttactcttgaacattttagcatataatttctacaatataagggtggtttcctagataacaagacaatcatcaaaatcaggaaatcagggctgatacattactaacatttaatcctcagaccccattcaggttttgccatttgtcccaatactatccagttcagaatcgtgtgctatatttagccaccatgtttcttttctctcctttgatttggaaaaattccagtgtttccttggcttttatgaccttgatacttttgaagattacagggcagttattttgcatgggaatgtccttcaatttgggttcctctggtgtttctttgtgatcaaattcaggtcacacatctttggtaagaatatcacagatgctgtgttctcgctgcatcctatcaagtaacacgtgatttttatttcattactgctgatgttaacttgatcactggattaaggtgttatctgccaaattttaccatgattcttgtttctcttttgtagacaatgaaaattttgtagggacctaatttggaagtatgtaaatatcctgttcttcatcaaactttcaatgtattcatttatttattccctcatggtttcctattttttataaatatataatcaattactgacattattgtgttttttggacatgtcctcatcattctttgagcactttcttactttctggcccaacaagaagttccagatttatcctgttctttccctaccccagccttggaacctgccaaagagccctggtttcttttagtcctacccttcctatgtagacaccttcctcatcctacttgcactcttgacatcccatgccagtcactcctccacaggggtgcaattctcaccctgcttgggctctgaaaccccatactggtagtgttccccatcccacaccttctgaacctggtcagcttccaacactctgctctgtgccactatagctccccaactttggcgtggatgcctaccttgcttgggctcacctaatggctttaggaattaactgcttcaaaaaaggagagggaataaaaaagggaaagagatatatacatacgtacatatatatgcacacacacacatattcatatatatattcaattttaaaatcaaacttagaatgatttacacttgagtgtcatttctcagtcttatttaattctcagattagatctctatacagaagagtcccacagacacctttcttctctttattttcatgtttattgttcaatctgtaaaaactgtatcatggttgtccctcacattgcttgttattgcagggacggcaaactcaaaagcttacatggaaggtaaggtggaatgcaattcaaccttactgcttaaagatctgatttttcaagagaagcaatatatccgaatttttatttaaaatctatttttaaatgctggcaaacttgtgagaaatttcttaaaacaatgtgtagaatacacaaaacatgctgacagggctgaatctggcttggaatttaaaactttacaatctactttctaaaagccacttcttgagactgccagatttttttttaagttttattttgttttctataaaaattgtgttcagagctctgctctccttgttagtctttaggatgatgttcccattcctttattatataggtattccatagactcctattgttttttgtttttattcatcctcaaataacagacctgctacttatcgcaagacagggtagaaggccaccctcagtctgtcaaagcagtacacgaccattttgagtaatgcagaaagtttagcatccctggcccccaaccatcaaatgccagtagagccccttcagttactctgacaacaaccgtacatttccaaacacctgctggggaagtggtaacacctctaatgtgagccaatccatgagtacaaaggcttaagagttttcctactagctttctcacgatgatgggcaagttgggtacaggagacacacttctcttcctaaagtcattatcatcttcaatatatttccttccttcatctttactttcatttttatgaaaatatggccatcagtgttatggctacctaaaatatggaactgaccatgttactccttcatgtcaaacccttcttcgaatgcttcccaccaaagatttccaagatagaccactatgtaggagagaggaaaaaaagcaaaagcaaaaacttgagcacacgataaagtacagcaaagtgtatatgattccacctttttaaaaagtaaatatccttacagtggtatagacagtttcgaagaatacacaagaaatccatcctagaaagattgggggtccagggttaaaaaaaaaaaaaaaaaaaaaaaaggcctactttagaatgtattactttgtcaactaaaaaaagaataatcaaacttttcaaaagaaaaaaagtagaaaaaaatgttttgcaaaattcatacttctgtgactttttcacatgctctgtccccataaaatatttctgtactctctacttctactaattcttaagaacttagcttggccgggcacggtggctcatgtctgtaatcctagcactgtgggaagccggggcgggtggatcacctgaggtcaggtgttcaagaccagcctggccaacatggtgaaaccccatctgtgctaaaatacaaaaattggccaagcatgatggcaggtgcctgtaatcccagctactcaggaggctgagacaggagaaccgcttgaacctgggagacggtggttgcagtgagccgagattacgccactgcactccagcctaggtggctgagtgagactccatttcaaaaataaaaataaacaaagaacttagctctggcgttatctccttaaaggcttttcctaataggttctcccagttctgtgaaaacagcacacagactgaagatatgtttctctggcctgtcttctctatcccaaactgacctgtgagctccctggacttatatcctattacctcagtacctacccaacaaacaaaatacctgttgaactagttattacaagtaagtcattatttaaatattgaccttgaaacataactaacagctcatttattacttccagattgcctaacacatacaaataatgtgacaaggccgttacaacagagataggacagtaaaactggtttggatatatttaatgatagtctttttagtacctacacactcttttttttctcttttaagagacaggatcttgctctgttgcccaagctggaatgcagtggtgcaatcacggctcactgcagccttgccctcctgggctgtggtgatcctcctgagtagctgggactacaaggtacatgccgccacaccctgcgaattcatttatttatttatttgcacacacaggtcttgctagattgtccaggttggtcttcaactgctagtctccagcaattttccctcctcaacctcccaaagtgctaagattaaaggtataagctactgtacctggcctatagatttaaataaagagccatacgagtacacgctatggcagtaagagaggcagattggagacagaaagcccagatttagtagtggttaaaactgtagaaaacaaaggtaaaaagaacctagtcgcagtttagatcaacagatgtataataaaatatggcactcaagcccttcagaacttccagttccttctagcacagtgttcctggctttcttctaaattttttcaggtaactatgtatctcacaagcccaatgcttgagatgttttagtgccaatgatagtagcttttgtgaatttagcgtgtggggaaatggaacatggcaatagacaaaagacagtaagaaaaactaaacaaaataaatagtgcatctgaaaatattagtaagtacggccacctttatagttttcctttttaaaaaaagaatgagttaaatgctaaattacatgctatcccctttaaatatactataaaatcagggaaaggaatactaactagggtagtaaatgtaaaatatgcatttctctcaaaagaaaagatcacaaattgcccacctgttagtctgaaagaaaggggagctgtcattcattcaatgaacatttactgagcgtaaactgagtgccagggtcttatatcccagagacaagggtgttaagcaaaactttagggacaaagagaagacatccaaccatttttcaaaaactcaagaagtttctcaactcagaaaataattctacataagaaaaagagagatgatgttcaatacaggcacttaaacatagccaataataaagtaaaaagtcaaaattaaatagtctaatttattatgtattaattacaatagtatttaatttgataatctaaatataaacaaaaagaacctatatggtaacaaaatgacaaagcaagtatcatctaaaaaaaagtgcatgagcgaggacagggaagacatgcactcaagtctcttcagacataagataatctactgttcttaaagacctccagaaagtcaaccatatgatcctttcaatgaatactgcagtgttcaacaacgctcactctcagcaaatgcattctggacttcccatgggtcacaagaccatgtggggcccagagctccttgccatgatactgattatgtcatccctataggggcagaaagtttcctttcaatttttcagaagacataatactatagtctgggctttgaatatatactcctcctatccttcaaactcccaccaccactagcagcagcagcaacagcgatctgccaagcagaaagcaacttgctactaaacttttggttactttaagctcaacctgggcaagtaagataaaataccactaacaggaacctgaaaacattccagtttcaaagttaatatgcacaagttttactcttttccatataaattattacatttgagaaatctgcttcattcatctagcaaatgtatactgtgtcctcactatatgctgaaaaccttacaatatcattatatctttgttgttaaagtttcattaagtgctatgctatgtggtctgttccacaaagcaatgaaaccaccttctattttcaacatatcaagatgataaaatggaaaatttctgttacaagtctttttaaaaaggagtcacatatcacagagactgaaaaaaatggcagacaaactattagcacgcaccatcacctactgactcagtgggtctggaatggaacgtaagaatttgcatttctatgaagttcccaggtgatgctgatgctgcttctcaggcctacactttgagatcaccgctctcgatcaggagttggcaaatatttcccataaaagcccagataaacatttgaggttttgtggggccatacagtcactgttgcagctactcaaagtgcaaaagcagccaaagacaatgtgtaaacaaatgggtgtggccatgttcctataaaatgttatttatcaatactgaaatttgaatttcatatgatttttaaaagaatgttttgataatttttaaatttttttcaatcatttaaaaatgtaaaaaccgttcttagcttctgagccatacagaaataggcacgggctggatttggcccatgggccatagtttgccaacccctgttctagatgagtggttcttaaccctggctcctcatcagaattaactggagagttttaaaagacccagatacttaaacccaagagattctgatttaattagtccaaaccctagggtgattctggtatacaatcaggattgagaactactgctattaatcaatatttttccaaatgacatctaaggatatttaggacttagtcttttcatcataaaagtttctagggttaggtaagtttggaaaatgaagtttaaacgatttatttattgcaggtcttctcacaaatctccaagaaaggtctatagtatggagtagttttccagattcatttgaccattgaaggcccagaacatctaatggaactagtgttctgttaagcatttgggaaacagtgctctaaatctttcattcataaagaataccagatacttactacttagatgcataaaattatagcaaaatatgacagcagaaactaattttaaaatgagaatgtgtttgactcttgataaattagcaatacaaaaatacaaactcctgataaatctgaacaagttaaaaagaaaaaagccacaaaatcatcaggcaatgatttttaaaaggaggggaaacacaacaatacatttgaacaataaaagtcaaggtaagaggtagttttctacaatgtcaaacctaacatgaaagatacagaaaatcagaacacatcaactatagaagaaactggaaatgaattaccaatgccctcaatccctaattaaagaaaaggagatgctgaaataaggtctcaacagatttactgatgaatgctcttaaatgtttcaagaactagatgactctttgataaatccaaaggatgtttatcattttatcctgtccaaacacacagtaggcactcagcaaatacagtaaatgtatttggaaaaatcaaaacatagttgtcaacacagaaaagaaagtatcacttccgtggtaccagtagcagcagtcaataacccatgccctgaagttctaaattgttaaggttcttcctactctaccctgcatgaggagaaaagctgccatagtgtaacacagaaagaagacaaaacgccaccaggcaccactggaaaggaaagtagtgaaactaacccctcacttctttcacagcttcttacacaagagcatcctgataatctgtattactaactggaagggcacttccctaacatgataaatcccggtatgcaagtaaactatgcacataagcaaatgagacaagtaacttgtaaagaccagatgtttattatcttactgcttgatgtggttaatgcccacaaatgcaccaacagcctagcggtactcttcacacattatgagcatgctattcgaaagactggcatatgcctgtcaacaatgatataaaataaaggcatgttctatcccacacacacttaaagtcaacgtctatgaacttgaaagtgtctgattaattagttccagagcacaagaaaggacttcatgttgccaattcattgtgaaacatttcattaatcctcacatctaaaatatggggagaaaaggtcttaaaaatacttaaaagatcatgtctattaaatatttttaaagtgaaaataaatgggcttttgaaattctaaataatgtaatgagtgaaaattagagataacagagaaaagtaaaaaaatgctatgtttagatatgacttagtaccccaaaaatctaaaatatctagcacaatatatactcagtagaatgtaattctgagatctcctttcgttttctgtatacactgtcttctacagcagacaagtataccaaatttcaacttttcttattagagacaatcagaaaaaaaaatagctgagttgaaaataaagaagggccaagaaaggtaagctgcttgaagtcacagaattgataaacaccagaaagattatttgaatccttacgtgattctcaaacatgtgctctttccactgcaccatggtaccagaagacaacttcagtttgacaggtatttactagaacttaccacgcaacaagcacaggaatttaaaaaaagagtaacatgttttaaggaaacctaagttaagtcaactgctcaagtatttggtttgaaacctaggtagatctcctaaatccaatttcaacaatccttctactccatgatcattacatatctaaaaaccacatatcctaatgtgtcctaggaacggtaaacatcattttaaatgctggggttaactataaaatttttactctagaatgttattagaagagtacaaaaaaggctgacatcccacacaaacaacatcttttgtgctttaaggcatccatagttctgaacacacacatacatacatacacacacacacacatacacactaatttgagaaaggggaatgtgagttataagtcaatttccaaagcaaactacattcagttcaattatagcacattctcaaatatatcatttgcaagcttcctatagatattttaatgttatcacttttaaagcatgaacacttaagttgagatagtcaatcttgacaatcttttaagaaaacatcaggtaattctgtgtttgtacaacttggagatatgtgggcttaaaaataagcgttcagtggattactgctggatgaacatccataatcattagtagatctacaaaaggctgtgtatctgatcttattctgttcaacatttcctattacaaacaagataaagacccagagattatactgaaagatcaggaaaaatcaccaattagtccacgatttgggcaaataagttgtcttgaaaaacaacaaaaaaaaatgttttttaagtcccatgaaaatgccctaataatatgcaccaaaagaagtaacccatccaggagatgaactaaggagcacggtaaaacagaatgactcccatcacctactaagcaatctatgaatgatacacatgattctgatcacttcagaaggaaataataaccagaaatattagaactttaaaaatcttcatataaagtaattctaatataaatagttaagttgttttctcgtaactttgatgacttctggccaagtaaaattaagatcaaaccactttaagttttctttgtaaataaaaaacatacttaccacaatccattcagcaatgttttcatagagctctggactaaaaattgcttttttaagcctagctagaggaccatcagcatctactaatctgcaccgcatgaaaacatcacagtaacctctaaaatcgttgcaaggggatccaggttgcagggtgatggttcgaccactgaagtgcctactccactgcacagaccctgtactggcacaagttgatgggtccactggaaaagaaatgccaaatataagctgaaggtcagattcaaatataagttgaagatcagatttccagttgtgcaaatacaaagagggaaaaaaaactgaaatcattaccataacatgttatacagaccttctctagttaggctgggtaacgccatcagtaattcatattaaatgttacaatgtaaacaagcaaccagcaagtcttgactcagtgtccacgatgacttaaagtctaacagtgtttatgtaaattactgctgtaaagctggcaacgttttgtctagtttatcatttttaaaacattgtagagaccataataatagagacacaatgctacgttacatttataatctcctcaagaggacagatttagctggaaattatctggccaaactgtaggtcaaagttttacacttaaaatttaggagaaaataatagtttgaggcaaattttatactcttgtgtttttaaaagccttacttttcttcatacagcatacatggcataattctttatcatctttgccatcagaactggcacacgtacactcctctaagccatatttctcacagatagaacctgcacattgctagaagaaaaataaaagacaaattgtttaatccctatacagtcaaacctattttttatagtaacagacaggcaagtatgagcttccaatgtcaaaatatttaaatggaaatgaaagtgaaaaacaaacagagatgagtatcaaaactgaattacataaatacatttgaaaaaatttgaaaaacagtaaatccaagaaagatagtaaatcttttaaagcaatggcaacttaaaaaaatgaaataaaagcagagcaagagattagatgaggatcgattttatgttggttattacggctcttctataaagaaagaaaaattaaatttttttcctgtagagcaaagtgatattcagccacaaaagctttgaaggtttgatattcagagaagatgaccaaagagttcttttatttaggctactgaaatattattttataaaacttaaatattatagacaaatcacatgccgagttgtacaactatgtttctctagagaatatcaaccacatgtacatggaaagatgaaagacaaattagtagctaattgaatgccacataatatattcatggttttgtgagggaatattacttaaacagagaccaagattaattactttaactatgtagctttaagcatcaataattcttctgaaaaacaagttttctaaaattaaattttaaaacatatagttaaatgcttaccccattaatgcacacttgtgtatgcctattacagtctgtgaagtttggtttagggtcagatgctgggcagagagctgtgaagccattacatattccttcccttgcacagtctgaatcatcccgacacttctcagactttgacttgaatgcacactgtgctgtacaacaaggaccttgacttggactagaggaaacattaagtgattaaacaaagtaaatcactagttattccctatatactattagatattagattagatccacattattagacatagtaccaatttttaaatcctaagtctcatcacttaaatgataagtatgttactggtatacaacttcaaaaaactgaaaccgcacaccgccctcctgagtaaacagtgcactggtggagccgtgtgtcccaaagaaacagtgcctgggcctacacagaaaagtcacaccctgcagggtatgagataaagcagcacattgctccttcaggtaataatgccttggccaagttgaggagctgtgcattccagggctaagccaacacagtaactcacatcccagggaaatatcagtggctgaactgggatactatgcctacaggccaaacaactctagcaccctgcttccctggagctagactagccccctagagtctgagctgctgagacacccttctccccacagtagtcatcactgtgctgttccctgccccctagggcccaaatgacagctgtgcttgaacattctgaggtacttgctgttgctgcacctggtctcacagactttgggataccaccaagccccaccatcccagggtctagactcaccaccacctccatccccggtgacccaactcgtcactgagtcctattggctcaggctccgaaattactgccatgcactgtgctctgggctcaaatctccagagcacctcttccctggacccaagcccgggctataccctgcccacaaagtgtataatcccagctacagactggcccgctgggcccaaggtgctagggagtaacccagagtcacagatcctggtgctataggcaacctacattcaatcttgccagacagtaaacatgcactgcaagacacaagtaccataataggtttgtgagatcctgagcctagaactccagccccacagttactctacgcatccgcaactggaagccagcaccgcagcaggtgctcgtaggccatgtcagacctgacaccaagagggatccccttggctaagtctcaccattatgggaaaaatgagaataggagggccccaaaaggcgttgccactgaggacattaacaacctacaccaccagcatccattaccacaaacttctacagcacagaccactgaggtgcctacagttattgatgatgttgaatacagctgaagaagctgcatggagactataccactgcacctacctggaaaaagaagcaccacacccttcccgaccagcacactaagacctagctacaggtgagagtatatctccatgaaagtcactctagaaaatttagatgagacgactgttccaccagacaggcacacagacatgaacacagggactcatgaaacatgaaaaaacaaatatatatgacaccaccaaaggaacataattaactctctagcaacaggtcccaaagaaaaggaaatcaataaattgcctaaaaaggaattcaaaataatgatttgagggaaaagacacaagaaaatatagataaaaaattcaatgaaactaggaaaacaattcatatgaatgagaaattcaaaaaagtaataaatatcattaaagagaaacaaaaatcctgtggcttaagaattc

SEQ ID NO: 39 - DNA, 1728 bp, Homo sapiens
ggctcacttgcaaaccagagtgatattttaaaactataatacaaatcatatcacccttctgctcagagtcgccccccatgtgtcaatgcataaaagtcaaagtccttacaatgtctccccattcattggcctccttgctattcctggagcacaccaggcatactcctacctcagggcctttgcacagactgcccgaagctctcctccccaagacgtccacaggggcaagtccttcacttccttcaaacctttgctgaaagtttaacttcccaatgcaattcactctaaccactctgcttaaaatccctaccttctccccaaccccctgcttttcttgtagtggttcccattacattctaccagtctacctaattttttttttttttttttttgagacggagtctctctgtgtcgcccaggctggagtacaatggcgcgatctcagttcactgcaacctccgcctcccaggttcaagcgattctcctgcctcagcttcctgagtagctgggattacaggcagtcacctccacgcccagctaacttttgtatttttagtacagatggggtttcaccatgttggtcaggctggtctcgaactcctgacctcgtgatccgccctcctcgcctcccaaagtgctgtgattacaggagtgagccaccgctcctggccagaaatctcttctttattatgtctactgtccgttatccaactccagaaggtaagaacctccactgatacataaggacttgtataccccacgtgcctgcaacatgcttggcacctagtaggcataccaaaatatataaatgttgaacaaatgaagaaagttaaagtaaaactagaggtaaaaaaatatcacaaaagccatctatggtcgccttttccctacctgattttgctgagtggccttacttttcagtcctctacacagctggaacattaatgaacacagagggggaagaagtgtgtttactctaggatcacctctcaatgggtcacttggcaagggcatctttgcttcttcgtcagctccttttgacacgggggtgaagggttttctgcaccacactttgaccacaagcatcaccaatttcactgaacccaacagaaatttggaccctctgggggctctctgcgtggcagggcccttttctttttctttgggcttaggctgcaatttgaaacaccactttcctgagccagcatcccccttgcagcgctgtcacagggaggcttaggcagccacgtggaagccacctaccccgacctttggcagaatttccaaacacaacacagtagctttaagttgattaatttggaactctgaccttggccccaaaaggtaagaatacataacaaggtattttattctcaaaatgtgtcaggataagaagcacttctgtaaatcgacctttttaaaatagatataattagatttgcagttgggggcagtaaagaaagggtctgaacagtggataacatgttgagaggttaattattaatgggcagtcttccctaacaaagtatctaataggcattgtggtctctttggcttcagaaattaccaagaaagcctggaccccgggtgaaacggagaaatggacacaagtcccctgtgtttctccattctgttggttttatgcatctttatccaatcaagtgcccttggacaaagcctgaaaccaggtaagagcctgacttttctccagagatgggcatgaacttt

SEQ ID NO: 40 - DNA, 1592 bp, Homo sapiens
ggagtcacctagtcctgattgtctggtctgaactcccagactttccctaaggaacttgcaggggtgcagggttgggttgtgctgggtggaggccggcagagcacagggtgagaaatccgagtctctgctgccctctcatggtggctaggggtcctgcaggtggttccccagagctaccagccaggtgcgcttcctcccggcccatgctctggcctcaggctagggtgtgtgtgctgggtggaggatagggatgatggtggggggggatgatatcaaaggagaagcagagaacagttggagggtgacaggaaccaagtttaagggagtgttggcgatacccatgccttaagtttccttgtctttcaggcgtaggttcctttctcctgtactctgtgcatgagggaatcaggggaattcccctggatcccaatgacaagtcagatgccctggtcccagtgtccgggacctcgctggctgtcggcatcgacttccacgctggtgagccatttggtggcagagggagttgggcgtggcgtaggagctttaggggtggtgtggtgtgccctgagggtccagtgagaggctgcctgaattggcctgaggtggggcacttgctacagctgccaccctgactccacctccccttcaagcacctggcccctccggcactctctcacctctgtcttgagccttgtgagattttgacccctcaccttacccctgccttattgggcatccccatgtcacctcctccacctccagaaaatgacaccatctactgggtggacatgggcctgagcacgatcagccgggccaagcgggaccagacgtggcgtgaagacgtggtgaccaatggcattggccgtgtggagggcattgcagtggactggatcgcaggtgagcagtgggcaggtttgtggggcttggggtgtggcagaggactgggggacgaagtgagaggaggagttggcgggagcaggaagaggagctgtaggggtgcctgggagcttggagacaccaggtccacctgtcctcacctaacctccctgagccccaccaactccctccttaggcaacatctactggacagaccagggctttgatgtcatcgaggtcgcccggctcaatggctccttccgctacgtggtgatctcccagggtctagacaagccccgggccatcaccgtccacccggagaaagggtgaggagctggaaagactggccttgtcattctgcccatggcccatgctgatgaggccctgtctcctccagggtctgaggactgacccccacttccacccccaccctacaggtacttgttctggactgagtggggtcagtatccgcgtattgagcggtctcggctagatggcacggagcgtgtggtgctggtcaacgtcagcatcagctggcccaacggcatctcagtggactaccaggttcgcacgccaacttggccttggatccgatggtagacccctgacccaggctcctgttccctgtgatgagcccattctgggaggacttggagcccaggggaagtcacagggtctcccagcccagccctccacccagagtagactcctgctac

SEQ ID NO: 41 - DNA, 1062 bp, Homo sapiens
cggggcacacagaagagcctgcactgtggccagctggtggctcagtacccatatgctgctgcccctagtgaggccgggtagagggaattggagtctctgagccaggtctccagggtgggaggcccagaccctgccacacgcccagcccaaggctccctgtgcctgcagtgccgctgtcgccctggcttccggctgaaggacgacggccggacgtgtgctgatgtggacgagtgcagcaccaccttcccctgcagccagcgctgcatcaacacccatggcagctataagtgtctgtgtgtggagggctatgcaccccgcggcggcgacccccacagctgcaaggctgtgactggtgagatgcgcgcttggagggcatgaggtgacccaggctgtgtgggactgcccgggtggcagagctccagacaggcaggagaccagggccgctagaatgtgccaggagctgaggcaagatcctctgtctgcagacgaggaaccgtttctgatcttcgccaaccggtactacctgcgcaagctcaacctggacgggtccaactacacgttacttaagcaggtaccaaacccaggccctcctccccgctgcccatctcccagacccagcacagcctcccttgcaagtctccccgcttaggtccaaccatccctcccccagatgcaaatgtggcccctgttgccacaaccgacttctgctgtccttcactccccaaatccagggcctgaacaacgccgttgccttggattttgactaccgagagcagatgatctactggacagatgtgaccacccagggcagcatgatccgaaggatgcaccttaacgggagcaatgtgcaggtgaggcgggcggccctcggcgaccaacactggcccgcctcagatgactgttttcagatcgtctctccttcccgccccaccaacccaaattgcttccttctcactccactagtcactaatatgactgcttgttctagctgctcactctcctctgggccagacagcaaggactgggagattcctcttgccttccctcgctgcagcctcatgt

SEQ ID NO: 42 - DNA, 1491 bp, Homo sapiens
tccatgaggtaggactttgtctgttcagtgctggccccaggacagcgctggcacacaggaggcactcagtaacatttgtggcatgaatgaatgaaatagaggctaaggaggtgggcatttgggctcaggccttagcaaattgcttctccagctgagatctccggtgtcaatggggggattagatgaggtgattgtggggcccttggaggtgtgatgcctcctgactctactactgagttggtgcttccaaggagtgtcagcaaagcttggcagactctccaggcctgcctctgctcatatccccaggctgggcttaccggggtggcagggcacagggatgaggagggctgacctgggcaacccctccctcctgaggccctccactgtccctctgcagccacgaggccccctggtggctgccacactgatgagttccagtgccggctggatggactatgcatccccctgcggtggcgctgcgatggggacactgactgcatggactccagcgatgagaagagctgtgagggagtgacccacgtctgcgatcccagtgtcaagtttggctgcaaggactcaggtgaagaggatggttggagggcgtctggaacagcacaatgtgggcaggaggagaccgtgttgagagcagagtagcggcaaaggggatggcactgtgctgtgtggagtggtgctggggacagtgcaaggcaaaaggcagtccagaggaagcttgtgtgtcatgggtgggggaaggcatgaagggccagagcctgcacagaggacctgagaagccaaaaccctaccagagttgagcttcagcacctcctgctgcagattcctgccttgtttgttgcctatgtgaatttgacccaaaaagcctcggggttcctcgtggaccccacagcgttgcaatcctgaccctattagagaagcccacagggtctggaaggaagggcagggggagccccagtccccgggcctgggccctcatagtgcacctgtccctcagctcggtgcatcagcaaagcgtgggtgtgtgatggcgacaatgactgtgaggataactcggacgaggagaactgcgagtccctggcctgcaggccaccctcgcacccttgtgccaacaacacctcagtctgcctgccccctgacaagctgtgtgatggcaacgacgactgtggcgacggctcagatgagggcgagctctgcggtgaggcctggtcccaggagaagggtagggagggtggctgggtaggagtctgggccaaggacagtctttgggggacctgagtctaggagagagcagctctggcagccgggcaggcgagcagcacccagagtggtcaccagcagcctgtgtggacctggcgctccccatggcgctgtgctgagtgagccacgccattagagcagtttatccacaaggcatccctgggggccaggtgctctgtttctccgtttgacagatgggagcactgaggcatggagggt

SEQ ID NO: 43 - DNA, 176080 bp, Homo sapiens
  misc_feature 108429: N = any nucleotide
gaattccactggacaacacggatatgcttccattcatcacccagctagttccccaaactggaaaaagatggtgctgtgcgtttttatttccctacttcccaaaaaacgtgaaggagaaggccgagcaaggtggctcatgcctgtaattccagcactttgaaggcagaggcagaaggatcacttgaggacaggagtttgagaacagcctgggcaacatggcgaaaccccatctctataaaaatcaaaaattagccaggcgtggtggcgtgcacctgcaatcccagctacttgggaggccgagggggcggatcgctggagcccaggtggtcgaagctgcagtgagctgagatgatgccactgcattccagcctgggcaacagagcgagacccagaagcaaagaagaagaatcatcctggtcatgggaacagcaggcagagaggatccccaggccatgctagccggggacttgcagaggggctcacggggcatgcacacaagagaggcaatcagaacacagttgcgagaacagcaccagggtgccctgcactccagcttcctccctcacccccacagctgtggggcagacacagacacagagacacacacatctccagcattgctaaaacataactcgttattaacacggacacaataatgatgcctagtgcacagcaaatactcaaaatgtcccaattctccaaaattgtcctttccagccacatatacgtatataggatccaaaagtcccagagaaacacacgttgcaggcgttgacagggctctccggtgcctcttacaccagacgagctcttttcctttagtgacaccactggcttccagggtctggccagctgtccggcaggatgcagcataacccggactggcccagcgtgaaattcgggtgtggtgttttgtgcagcaacactcacaggagacgctgtcctccgcccgtcacagcaggggacatgtcagctgtacctcccaggtgatgctacatccagtcatgggggaaggactgtcgccagctgctcctgcgtaagtcccccctcccctttgtaactggtggtcctaggagcgtgaatatcctgttccccaacagcccttaactcaatggctttggcacccgagttagttgcctgtggctgctgtaacagattaccacaaacaacacaggtgtgttctcttccagctctgtagaccggaagtctaaaatgggtcacaccgggccgagatcggtgtcggcagggctgcattccttctgcctgtgttcctgggtacatgtgtggccctttcctccgtttccaaaccccatccctccaagctccgcgtccatcactgcatcccctcctcaggctctgaccctcctgcctccctcttaaaaggaccctgaagatcaccagagcccacctggataatccagggtggcctccccgtctccaggtccctcacttagccacatttgcaaagcccctcttgccatacaaggggacctgtgattacaggttctggggcttaggacaggcacctgccttggggatgctattcagccgacttcaacatccgctgctgatcttcacctgaatgtgttcattccagggggagtgcacaaatggggactttcaaacccatcgcctctcccacgttggctggattgttctaggaggaagtgctccctccttctagggccgccatggactatactgttcatccaatgctcttcatcctatgtctcaaatttggccgccagagccccttccacctggcctttttggcctgttgaggcatccccgtctgtcctcaagtgcatcggccctcctggcgcaacgcgatccatactccggctcatcctgtgcccacctccaccaagatccagacttaggccccaccgtgccgcacagcttcggaaaccacccgtgtgcctctgtgcttgggtagcacccatgttagctcctttcagtggttagagacagaaaatggatgttttttgaattatgagttattgctgccgcttccagtccaagcacaagcccccgggaaccctctttgtctcccgttccacatccctatctcccgcctcccagcgagagaaagagtcctggttccgaggaggaccaccaagctgctgggggtgaccagcccttaatccacagacagtggtttcagacgaccacagcagcactgctgctgtgacaaagccggcctgcgacgcggagctgcgggtccccacagccagaggccccttcgaaagccgcttccattcttgtttccatctggtgttgctgtcaattgttttaggttcattgatttctgtttgaattcattgctcaattttttggtgcttgtcaatttaattctatttctgaacgtgtaaacatttacgtgtttcaaaagtcaacacctatgtaaaggattctctgacttctcactccacccagtcctcccacctggtggttatttatgtgtgtgtgtagtttctgtatgtagtttacatgtgtgtgtaactcgtgtgtatggtttatattgtgtgtacagtttgtgtgtgtggtttatgtgcatgtgtatagtttgcatatgtagtttatatgtgtgtagtctgtgtgtgtagtttatgtgcatatagtttgcatgtgtagtttatatgtgtgtagtttatgtgtgtatactttgtgtgtgtggtttatatgtgtgtgtgtagtttgtgtgtgtatcatttatatgaatggatagtttgtgtgtgaagtttatgtgggtatagtttgtgtgtgtggtttatatgggtgtgtatagtttgcctagtttgtatgtgtgtgtgtagagtttctgtgtgcagtttatgtgtgtgtagtttgtgtgtgtggtttatatgtgtgtgtagtttgtgtgtgtattgtttatatgaatgtgtagtttgtgaagtttatgtgtgtgtaggttgtgtgtgtggtttatatgtgtgtgtagagtttgtgtgtgtagtttgtgtgtgatttatgtgtgtgtagtttgtgtgtgtggtttatatgtgtgtgtatagcttctgtgtgtagtttatgtatgtgtagtttgtgtgtgtggtttatatgtgtatcatttctgtgtgtagtttacgtgtgtgtactttgtgtgtggggtttatatgtgtgtgtatagtttgcatgtgtagtttatgtgtgtgtactttgtgtgtgtgatttatatgtgtgtatagtttgtgtgtgcagtttacatgtgtgtactttgtgtgtgtggtttatatgtgtgtatagtttgtgtgtgtagtttatgaaagtgtactttgtgtgtggggtttacatgtgcgtgtagtttgtgtgtgtagtttatgtgtttgtgtatagtgtgtgtatgtggtttatatgtgtgtgtgtggttcgtgtgtactttatgtgtgtgtactttgtgtgtgtggtttatttgtgtgtgtatagtttgtgtgtgcagtttacatgtgtatactttgtgtgtgatttatatgtgtgtgtatagtttgtgtgtgcagtttacatgtgtgtactttgtgtgtgtggtttatatgtgtgtatagtttgtgtgtgtagtttatgaatgtgtgtgtgtgtggcttatgtgtgtgtgtgatttgtgtgtgtggtttgcatgtgcatgtgtggtgtgtgtgtgtgtccccttacacccccttctcacccacctgcaggcggcctcggcgctgcacctgccacactgagcagcctgtctgtcctcccgtgctccgactccctgagttctccccagtccccccaggccccccaggctccccacggccacatgatgccccgcgctgtggctgttcccatttgcacagccctgcctggtgaatgagcactcaggtcgttcccagtgtctagctgtgacaaatgaggctgtgctgcatccctcaagcatgcactgttccctatttgcagaggtgtcacctcgggggaaattcctagaaatggaatcgctgggtcaaggggcaaagccagtgtaattttgttagctactgccaccttccgctccctcgggtgaaggacagtttccctcctagtgtctgagggagccagtttcccacggcctcctccaccgcagtcgcgcttttgaatctctgccagtctgatatgtgagaaactgcatctccgcatagcttgtatttgcatttctttactacgagcctctttccctatgtttcagagccatttgttatcttgttctacacactctgtccatggattttacctacttctctgtagagtttccgggtttttcccattggcttgagtgagccacgcacacagggaaccagaggcaaaggggacgtgagacctgcccacgggaggatcaaggaggtgactgccccacagacggcctggggaagcccacccagctgggagacagtgggcgcgtcgccttggctctggaagcagtgggaaaagcagaaaaaggtcaccccaggaaattccagtcacaagcccacctcaggggcagtgtggccagaactcacgctcactagatgactggaaaaaccccaggccaaaaatttagtttgagggagtcctggcaacccaagcttctgggagaagcaaaggcgaaacctttccagagaaaggcgttggaaacctggacctcagagaatcctcgcagacgggggtccggggaacgcagccttgccaccttacaagttacccacacgcaggagaaaatctgccctccccaggacaggagccccccgcaacggcgtctgggaaacgtcaggtccactctgccagccacaaggcccctggaagcagcgtggcctgggtgcaaagcaaccgacacctcacccgcgcccctgggcctcctgaggaaagaaagccccaggtccccagagtgcctgtgcggcccctcatctccgtgcatgacaacccctttggctgtgacctgggggaaagaaattgaatcccatcatttgggactttcacttaaaactcaaagttctgagctttggcttttaaatggtgagggcaagaaaatgcattttcactttaaagtctagcaactgtaattggcaagggcgtttgacctacagatttcttcgatcaagtaatacaggaatggaagagccccccacgtttgggcccctgtgtgtcacagtcttgccgtcgccatggcacagctgcaatgtcgcgtgactgtgcagtggagaccgcgtggggccgccgtgtgtcacagtcttgccttcaccatggcacagctgcaatgtcgcgtgcctgtgcagtggacaccgtgtggggccgccgtgtgtcacagtcttgccattgccacggcagtgctgcaatgtcgtgtgactgtgcagtggacactgcgtgcggccgccgtgtgtcacagtcttgccatcaccacagcagtgctgcaatgtcacgtgactgtgcagtggacaccgcgtggggccgccgtgtgtcacagtcttgccgttgccacggtggagctgcaatgtcacgtgactgtgcagtggagaccgcatgcggccgccgtgtgtcacagtcttgccgtcaccatggcacagctgcaatgtcgcgtgactgtgcagtggacaccgcgtggggccgccgtcacagtcttgccgtcaccatggcacagctgcaatgtcgcgtgactgtgcagtggagaccgcgtggggccgccgtgtgtcacagtcttgccattgccacggcagtgctgcaatgtcatgtgactgtgcagtggacaccgcgtgcggccgccgtgtgtcacagtcttgccgtcgccacagcagtgctgcaatgtcacgtgactgtgcagtggacaccgcgtggggccgccgtgtgtcacagtcttgccgtcaccatggcacagctgcaatgtcgcgtgactgtgcagtggacaccgtgtggggctgccgtgtgtcacagtcttgcagtcaccatggcacagctgcaatgtcgcatgactgtgcagtggacaccgtgtggggccgccgtgtgtcacagtcttgccattgccacggcagtgctgcaatgtcgtgtgactgtgcagtggacaccgcgtgcggccgccgtgtgtcacagtcttgccgtcaccatggcacagctgcaatgtcgcatgactgtgcagtggacaccgtgtggggccgccgtgtgtcacagtcttgccattgccatggcagtgctgcaatgtcgtgtgactgtgcagtggacaccgtgtgcggccgccgtgtgtcacagtcttgctgtcaccacagcagtgctgcaatgtcgtgtgactgtgcagtggacaccgcgtggggccgccgtgtgtcacagtcttgccattgccacggcagagctgcaatgtcacgtgaccatgcagctagacaccgcgtgaccgtgcagctggataccacgtggacggcgggtgggaggcatgagttccagctttggcacaaacgagctttgcatcagtttcattaatcctgttgtaactgcccagtgtgttcacctcgccggctgcctagacacagccgaattatcaagacaggggaattgcaaaggagaaggagtaactcaacgcagagccagctgtgcgggagaccagagttttattattactcaaaagggtctccccgagcatttggggatcagagtttttaaagataatttggcaggtaggggctcaggaagtggggaatgccggttggtccgtttggagatggactcatagggggtcaaagtgagtttttcttgctgtcttctgttcctgggtgggatggcggaactggttgagtcagatgactggtctaggtggtgtcagctgatccatgagtgcggggtctgcagaatatccccagcactgatctcaggttttacaatagtgaggtgatccccagaagcaatctggggaggttcagactctcacagccggaggccgcaagacccctaaaccataatttctaatcttgcagctaatttgttagtcctacaaaggccgactggtcctcaggcaagaagggggtctattcgggaaagggctgttatcagttttgtttcagagtcaaaccatgaactgaattccttcccaaagttagttcggcctacgcccagggatgaataaggacagcttaaaggttagaaggaatatggagtcggttaggtctgatttctttcactgtcatcatttcctcacttataatttttgcaaaggcagtttcatggggggtaaacccaaacggccccctgcagtcctgggagtggcttcatgaaggggaccccgacagttctcctctccctaggggcggccccccagctgaccacaagtgtgaccacgaggcccttgggtagggcaacaaaaggccggggaaggtgggggtgtcctccccaactcccgagcctccttccacgtggagaaaactgacttctccgacccctgcctctctcccaccatttgtcacccacccccacgcagggaggggttggcaaatccaggcggggtctgcagggcaggctgagctcactctccgctgccacctgcaggggtggcctgctctgctgaacaggtgggggctccctggaggctggcctgggctgcacctttgggcaggtggcctctccactctggggttcagggaaggcccccttggccttcactctgagccgcgtcctccgaccagcctccattgggaataacgggcagcctggcatcacagcctctgtgggcccctcctctgggctaaagtattacgaatgatgtttcataactgcgtttgtagaaagatgactacagcccaggctgcactgtgtttattctgattttagaaggcattaaaccactttcctgacccctaaaagtctcctgggccctggcactaagcctgctacaccctgtgaaaggaaaatcaatctcaggccccaaaattaccaagccaagggaagagtcaagctaggtactgctcaggcaaacctgcctcccagtccactcctgaataagatggctacagagactaaaaagccactacctccctcaaaatttgcccatgaggaaattcctcatagacaaatgacagacaggacccaacgccatccctctgctcccctgagacaaatccatatctgatggcttcctctgccctattgttgatataaaaatacagattccctgagccagactaaattgtgtttcagtgggaagccgatcaaggtctcaaaagaatgcaacagtttgtctcttacctacttatgacctggaagtcccccacccccgcaagttgtcaagctgccccaccttacctgaccaaacaaacgtacatcttacacatattgattgatgtctcatgtccccctaaaatgtacaaaagaaagcatggtggctcacgcctgtaatcccagcactttgggagaccaaggcaggtggatgacgaggtcaggagctcgagaccagtctggccaagatggtgaaaccctgtctctactaaaaatacaaaaacttagccatgcatggtaccatgcgcctatattcccagctactggggaggctgggacagagaattgcttgaacccgggagacggaggttgcagtgagccgagatcgcaccactgcactccagcctgagcaacagagtgagactctatctcaataaaataaaataacaaaaaaaaaaaaaaaagcaaactgtaccctgaccactttgggcacatgtcgtcaagacctcctgaggctgtgtcacaggcccttacttcaccttggcaaaataagtgttttaaatttattgagacctgtctcagatatcttttggtttacaacctgatggaggagttggcactgatagaagggttttgggtttccagcacctgccttcatgccttacttctcggtgggctcaggactcagaatggaaaagagtcccaggagaccccagtagctcttcaactcttttactctcgctgttttctctcctttacagcagacaccactatctgcaaagggtcctgttcgctgcttctgcctgccaggaagcacagcctagagggcagtgtccatgactgtcctgagtaaccactgggtccccagcatctcagcttcacagctgttccgtaatgaccttcagatggagggacgaggcgggtgggtggggggatggatggatggatgcatggatgggtggatgggtggataggtgagtgggtgggtggatggatgagtgggtgcatgggcaggtatgtggatagatggaagtatgggtagatggatgggtggatggatgggtcaatacgtggatgggtgggtgggtgaatgggtggatggatggatgaatggatgagtagatggatgcatgaatggatggttggatggatggtggatggatgggtgagtaggtggatggacagatggggaatggatggatagatgaacaaataagtgatggatgggtgggtgtatggatggatgggtgggtggatgggtgggtgggtggatgggtgtgtgggtggatggatggatgtgtagatgggtggatggataagtggatggatgggtgaatgggtggataagtagatgaatgggtgggtggagaaatacatgagtgtgtggatgaataggttacagagtaaaatgccaccaccagagcagtgcaacagcgtgctttgcactcagctctgccatggaaaaagtggttccttcccaggctctcaccaggctcacatgggctccagacccctgcacccccaaccagactggggacacagggactgtctgctcagatctgcatccatgcacctggccaacaccaagtgagtcacagggaaccaggtggcctgagagaaggaccgatgacagatggcctcacccatgtcgccaggaggcttgggtcccagtcctgtggccccaccagccaagagcttgtggacattcagaatcaggcttgctggtttaagcccgggcatgcagcaccaacattgtctgcccatgggctctctgggtcgtgccctgcctgactcagtccctgcatcaccagtgccaggccaggcacagacaggctcagtggggtgggctaagtagtgctggggacccaaaccaggcatcagagggattgagatgcccccaggctgactcccactcaagcgggtccccccgcctccccccgagcccatcccctctgtccacctgctgccactctgacagctacaaccaacccaggctcggggctgcctggactctgcctacaacttcacaggctcactcccatgctgtccttcacacctggagaagtgccaaggttaccagtgccacagaacaaacagccgcatgcactctgcaccctgctcagccattgagacagcagattctgtagctttgggcagttcccacatccttccagtcctgatctttcccctggaagccaaggagcattcagcgccttctctacgtgctcttggcccctgtccacaacaaaggccacaggtctcttgttgtggaactatgagtgaacccagcgttctccccagggaccccagcacaaaacaagctctcaacacacatgagtgaataaaattgtcccagaaagcgggagactttacacagtggctacaatgtccctagtacactgccacagtccagaagggagagaaggggctgtgcacaccaggaagccagaagcccacatgcacctgcacagggtctgtgcatggagctccggcaggtccaatctcttggccttcagaataatgatgtaaatacaggcacaaacatggagcaggtgccactcaatgtgcaaaccctcccccttcttctggtgaggccagaagtacctaggtaggagcagcccctacctccgaccacctccctccctgcagtgggaatagcagcccaatccccaggctgcagggatccacaggctgtgcaagtgtggctgtaccccagcatgccctggtgcaaagctgtgcccagggagatgttatctgcaccccagactgcctgtggtgctgcagagtggtgccgaggacggagcagggcacacctggagtctatatcacctgccttccctagggagtcttgggccctctccacattcaaggcgaggggagcaggggatctccacgaagaccccctgagcacctcccttctctttttgctgataaataacccaaggcttaaggggttttggaaccaagacatggtcactgatgttagaggaatggctcgctctccctcctagcatccctaccaggtaagggggggcaattggttgctccaagcaccctggttgctgtaggaaggagaatggagacatcgggctgagcccactggcctccttcagcgctcgggctctcccctgcagacagccttcctcagcagccgcacagctcagggcttctcctccctgggtgccagtaaccccaggtaagcctctggctgcccggcaattccaatacccagagggaggagccaacagggcaggccacgttctcaccaagccatctgcagaggggtcaggtccaccctgagtcctcccttctcagtaacaagctgctactgtgttttccattgtcccacagctgatttgtcagtcagtgcaatcacagcgaggacaaacactaatgcccctcctgagacctctcttccggctgatggtgtggaccttgactccacagcaggtgtctgcaggccctccagctggccctcggtagcctggagtggctcatcctggacagactcaccgctatgacgcagggggaactgccaggagtccctgagcgaggtgatctgagaaatgccatggcagtgttctaagccagcagcctggcttactcacaacctctctgctgtgtgaccttgagcaagtgccttaacctctctgagcctcagcttgcccctctgttaaagaatgatcatatatgacacctaacaacgttatgtggagtatcagcaacaaggaatccactgcagccagtgttgcaggtgcaactggctggggctggtgtcacgggtggtaaaagaatttaccgagacagtcgtgggtaaagaaagtctgaagacaccttgcaagagaacagcaggcagcatggcagagagaaggccacctccccaggggcaggggccagggggaagtttgatagggtcacactggagaggcgacatgcagacagggtcatgctggagaggccacatgcaaacagagtcacactggagaggccacatgtggatacagtcatgctggagaggcgacatgcagacagggtcactctggagaggccacacgcagacagggtcacgctggagaggccccacgcagacagggtcacgctggagaggccccacgcagacagggtcacgctggagaggccccacgcagacagggtcacgcaggagaggccccacgcagacagggtcacgctggagaggccccacgcagacagggtcacgctggagaggccccacgcagacagggtcacgctggagaggccccacgcagacagggtcacgctggagaggccccacgcagacagcatcacgctggagaggccacatgcagacagggtcactctggagaggccacatgcagacagggtcactctggagaggccacatgcagacagggtcatgctggagaggctacatgtggaaacggtcacactggagaggcgacatgcaaacagggtcacgctggagaggccacatgcagacagggtcacgctggagaggccccatgcagacagggtcatgctgctggagctaacgtgcagagtgaggtatttggtaacatgaggttgtgcaagcgggctgcttgtggttagccatttcttagaacaacggctctccccgaccctagttcatgttcttgccagctagggcctgtggtgccatggagctgtgcagaggagggaaccccttcctcatttctatcagctgatcgggactccacagtttggtttcgctgcatatgacaatcccagcaaaagaagcataaacaagaaagaagctgatttctttctgaagggagaatctggggatgactgattgagggtgaggtggcagctcctcgatgtcctcagggacccagatcctggctgtcctgctcctcgtcctccacgcatagtgtctagcctcaaagccactccatggtccaaggtggctgctggtgctccagccatcaagaccacaggacaggtggaagaaagctggaaaagtacagggcagaaaagggcccctcccagaagtcccagctgagtcagcttgtttttgagccatcttcctggaagtctcctacagcacttctgcctttaacccactggccacgacttagcagctcggctccacttagcctcagggaggaggctgggagatgcaggttttcattctggccagctacatgccccacgacgcatcagggttctgcctccgcggaggaagggaagaggaccatgtctgtacaaggggagctagacccacgataaacatgagccacgctaatgttgtcagcatccccagaacagccggcaacacagcctcacatcacacccaacctcccgccagcctccagccctgggcagcgtcctcactgcaccgcagcctagagagggagccagagtgcaaaagggacagaaagggagagaaccggaggccacgctgacccgagcagccagggacagaggacagacccgggaggcagatgggagttcagggcaaggaaagtcttgggggctgcctggggcggggggagggagatgtggggggcagaggtaggggtgagctgcacctgggagggaacatgcaccctcttcctaaggagaccctgagaggctcaggggagacggtagcatgcaacagcacctgctgctcccctctgcaggaggccgactccacggaggaccatgctctggcagaggaacccaaatatgcatttttcccacacctcagcctctcctggccccaaggcaggtacaggctcagagctggggaaccggctggagattttcctctttttgctgactctgccctggcatattctgagatacaggggtcaagacttcaacatatgaatttgggagtcacagttcaacccagcatgctatacagatctcaagggtgtcactcagggagttgacaaaagcggactccaccaagataagaacctgaccacccccgagatatgcgctcatcagtccccactgcaccccctccagaggcgacttttcattgcagatcagcgtgacctgttctagagcttcctacaggcagagtcaggccgcactggcccgccccagctctcagaggccggccatcactgtgcacccacacaccaccagctgtaacccaggcacaggacctcaaggtgggctggctcagctgccaacaggagcgagtggtgctgaggtcctcccaggagccgtggcccagcacctcctggccggaacaaccatcctattcaaataaacgagtaacaagaatgggcacgctctccacttccaaaagcaatgctggccgggcgcagtggctcacgcctgaaatcccaatgccagaggcgtgtgaaccagagcaactccatcttgaacaggagctgggtaaaatgaggctgagacctgccgggctgcattcccaggaggttaggcattctaagtcacaggatgagataggaggtcggcacaagatacaggtcatgaagaccttgctcataaaggaggttgcagtaaagaagccggccaaagcccaccaaaaccaaggcggccacgagagtgacctctgattgtcctcacggctcattatatgccaattagaatgcattagctgctaaaagacacccccaccagcaccatgacagcttacagatgccatggcaatgtctggaggttaccttataaggtctcaaaagggaggggaggagacctcagatcctcttcatccctttactttcctgataaacttgctctcactttactccgtgaactcgctccaaagtctttctcgcatgagatcaaagagacctctcttggggtctggatcagagcccccccttttccagtaacaccagcactttgtgggaaagacagaggcgggaggattgagtgaggccaggagttcaagatcagcctggccaacataaggagacctaagtgtctaacttaaaaaaaaaaaaaaaaggccaggcacagtggctcacgcccaatactttgggagaccaaggtgggcagatcacttgagcccagcagttcgagaccagcctggacaacatcgtgaaaccttgtctctacaaaaaaaaaaataataataatactaagaaattcccgggcacgatagtgtgcatctgtagtcccagctattcagaaggctgagatgggagaatcgcttgagcccaggaggtagaaattgcagtgagctgagattgtgccactgcattccagcctgggtgacagagggagaccctctctcaaaaaaataaaaaaagaaacccaggcaggcatggtggcatgcacctatagtccccagctgctccggaggcagaggcagcagaattgctcgagtgcaggctgtaggtcaaggctctagtgagttacgattgtgccaccgcactccagcctgggtcacagagcaagctgcagtcttaaaaaataaaaataaaaaataaaagcagtgctattctcctacaaatgaagaaatctcatcagacaaatactgccacaaaccagatgaaaatcatgatctaatattccaacaagaacttcagctccgaagggagactacagcacagaataagaacagaggagaataagcacagaataagaacgcagggaagaggtggccaaatggcagcggagtctgtggtaggaaatgacagaattcaggaaggaaactgaagaaaaagacaaaaccatttcagaaatgaagaaatgaagttacaggtaatacgagagcagagacaccacgaaaatcatgtaaaaaaggaaaaagtgagcaaatggaaagaaagaggaaagagattaaaaaggattagagagaaagtgactataaaagaccagtaaagggccgggcgcggtggctcccgcctgtaatccgagctctttgggaggcaagacagttggatcacaaggtcaggagttcaagaccagccttgccaagatggtgaaaccccgtctctactaaaaatacaaaaattagccgggcatggtgatgtgtgcctgtaatcccagctactcgggaggctgaggcaggagtatcacttgaacccaggaggcagaggttgcagtgagctgagactgtgccattacactccagcctggcaacagagcgagactctgtctcaaaaaaaaaaaaaaaaaaaaaaaaaaaaccagtaaaggggctccagcgtacacatacgataggcaaaactaacagatcagaacaattgactacttgatttatgtgagagatgatctcatataagctagcgttgcccaggctggccttgaacttctggcctcctgagtagctgggaccacaggtgtgcaccacagcacctgatgaacaaggattgaaactatcattcaagacctcttttattgaaatgcaggcagacttgcgcctgcctgtaaaagtgcatgctgtatacttgtgtgtgttggcccagaacagtcaacacaaaacatgcctttgtaaaatcactggactttgaagataaagaaataatcctttaggcagccagacagaaagaccaagtatcttataaagcaaagaaaaccaacttgacatcagacttctccaaagtgacattcaataccagaagaaaaaagaagcaatgcctccttatctagaatttgtgggtagaattctgtcccccagaaagatatgttacactttgggaaattgaggcaagtggatcacttgagatcaggagttcgagaccagcctggccaacatggtgaaaccctagctctaataaaaatacaaaaattagccaggcatggtggggtgggtgggggcgcctgtaattctagctactcaggaggctgaggcaagagaatttcttgaacccaggaggtggaggttgcagtgagccgagatcgcaccactgcactccagcctgtgcgacagagcaagactctgtctcaaaaaaataataaaaattttaaaagatatgttaaagcctcaacccctggtacctatgaatgcaaccgttttggaaatagggcctttgcagatataatcaagtgaagtcgcagtcacacctgattggagtgggccctgattcaatacaactcacctccttataagaagacaaaaatggcctggtgtggtggctcatgcctgtaatcccagcactttgggaggccaaggtgagtggagcacttgaggtcaggagttcgagaccagcctggccaacatggtgaaatcccatctctactaaaaacacaaaaattagccagtcatggtggcgggcacttgtaatcccagctctttgggaggctgaggcaggagaatggcgtgaacccgggaggcggagcatgcagtgagcagagatcatgccactgcactccagcctgggcgacggggcaagactctgtctcaaaaaaaataaaaaataaaaaatagaagatgattcggcttatgattctggaggatgggaagtccaagtttgaggggctgcatctggtgagggccttcctgctgtgtcatcacatggcagaaggcatcacacggcaagagagtgtgagagagtgagagaacacatgcccagcctcgaggccttttgttacctgcatggatcatccatggatcatcctaaacacctccccttaggccctacctcccaacactgttgcattgaggactgagtttccaacacgtgtttttagagggacacattcaaatcacagcttcccccctccaccacccattttaatcctgggctttgcctggctccaattcctctcttatgtaaagcaatggatcagacacacagccttgggggatctgtgagaactgaagggactggggcctctctcacacagaaccccaaaaccctcccatgcctccaggacccccagcagggaagaaccccacctaactcagggcccaatcagagcagggccaagggttatccctgccctcagactggttttcccaggctagggtctgagaaccccgagcagccagtccttcttcccatgggatgcgactggcagggccagtgaaggaacccagaggcatgttagtcaaagtgggtttcagtctctgggtgaggggtcctgcatggtgagaagctgggcccacctcccacagagcccacagaacagactcaaactcagacaccaacaagaagatgccaaggctggggagggcagcccagcccgcagagttcctgcaaggactcttccctggctgtggtcggagcagctgctcaggaaatccctggcagcagagtgggcacccctccgggcaccaggaggagaggtgtgcaggggggattccggggcagccattgggatttgagactagcctggacacccacatccacttctcccctaccaggcgtttctcccatcagggaagaggaatgctcagaggcccagaggccatgcagaaagaaggaggcctccccgggggctgagaaggcagtgatgggaggccggccccaggcttggggtgtgggtggtttcaattggaaaacttttataataaaaaattggaagaaagaatgtaattccctctacaaaaatatgtcctctgatgccacgtacccacctatacccacctgaccccaggcgcctccttccacagccagccactgcaaaggaggccagggaatgcgtcttcctggtgcccacgaaggagacacagagctggagggcatggggacccaaggttccaggcttcggaagggaaagcgtccacagcgaccccacagtaaggacagcctctgatggcagcccccactggccaaactacatccccctgggcagagtgcaccgggcctggcttccctccatgctggttccaactcacagccggggtgaggccagggcgaggccaggtccccctcacggggaaggctccctgggtgcttccctggtcagggctgtgcattctggtcaccagtccctccctgaccccagtgactctggctgggcctccacccctgcccagcccaccccaccacagagccctgtctccattactcttttttaaatattttattttttcagagacagggtctcactgtgtttcccaggctagaatatagcggctgttcacaagcatgatcatagctcactgcagcctggaatctctggcctaaagcaatcctcctgactcagcctcctgagtagctacagacacaggccacacccggctctcagcattccctcttttactttattttatttatttatttattttgaggtggagtttcatcttgtcacccaggctggagtgcaatggtgggatctcggctcactgcaacctttgcctcccagattcaagtgattctcctgcctcagcctccccatagctggattacagcacctccaccacgtcagctaatttttgtattttttttttttagtagagatgggttttgccatttaggcaggctggtttgaactcctgacctcaagtgatccgcccacctcagcttcccaaagtgctgggattacagcatgagcaccatgcctggccggctttccctcttgagcaatgcatgtaggcaggaatcccagccccctttgcagatgagcaaactgaggcacagagaggttcagccacctgcgaaggttgcacagccaggatccaccgccttctcgcagcacccaccctcttcccaaggatgcccagttcagcaaggcaagtgacaccaatcccaactgggcagcaggttttatgaggccaggacaacagcactgatttgaagctcgtagaagggttcaaatcacaggccctgccacagctggcctcagggtcctgggggagctgtgggcatgcttctgagccgtagctcctctatccacccaagggagctggtagcactggccttaagagtgtgctgtgagcccggggggttgcaggtgggcattgatgattcctaccaccccacaaatactactctgccctccaacgggggcaacccctcatggcctgcctcggagcctggaagtacactctattgcatcacccccaggaagtggagagaggcccccaggactcatgagggtggttttctgcgtaatgagatgccttggatattcctagaggtccagcctaggccttgtcagcacatcagtgaatgcagccctgctggacaagctcaggaggactccaggatcccgagtgacacattccacatccacacaggcagaccggggcctgcaattacagatgggaggtcccaaggtcaaggcgggggctcccacatgttcccaggaaagcaccaggcagggagggtggtgggcagcagttctgggctctgctcctccccaggccccattcttcatctgtaaaatggggagaaatattttcccttcctaactgcattggaaagacgagataagcagccgactggggaaggtggacttcccactcatgcaatattgggcgaaataagtgggttcagagactgagcagtggtgctggccccagacactggtgtggatgcaacacgtcgcaggactcagcccgtcgaacccctgcccgccgctgcactgatgcccccttccccctcaaagagccctgatgcccggccatcctgatggcgggagctcctctaggcctccacagccgtggtccaaacgaaccctgcactccacccagggctcctaccactggggcccctgggctgcctcggggtggcctctctaatcccggcatccagcaccgccccctgctgagggtcggccaatgtttcctgatgaatgagtggcccctggatgtgagcatgggtcacacacctccggtgattgggtgggggtttctctgagtagagggacccccacatgccaggctgcgctgacagggacgtcagtgactccctctctaaggcggccatctgaggcaggactctaggagcctctgtcacacccggcagtgcacaggatgattcagagagaggctgtcccaaggcctcccggctcactggtcgcagtcttcccggtcctcccgccaccctccacacagcaccatgccacccacatccctgctgggcaggagagggggtcgggagggcagacacagggcagtgggcgagtctgatccaggtttttgagcctccctataaagaaaagaatacaaacttacaaaaacaaaattaggtatgacagtgaatatttctttaggatgaggaaaaaaaaaaagcaaacatacaaaatccagaaaaccaacatcgtgtttttacgaagggcctgctccatctccataacacttcttcctgcactttttggctgcgtactttttatctatctcattgtttgagaattttacatcacctacgatagaaggaatagaaacataattgctcttcctccagcatggctgattgaaatttgttttttcttatttataattagaacacatagaacagatgacttaacacatgtgcacacagctttgcagtacagctagaggtctgtgtacattaaacaacaagttctgatcaattctatttacaagattcctgtttgcgaaaggaacaggccaggcatagtggctcccacctgtaatgccagtactttgggagcccaaggtgggggatcacttgagcgcaggagttaagaccagcctggccaacatggtgagatcctgtgtctaccaaaaaaaaaaaaaaatagctgatgtgtagttcagctctaggaggctgaggtggaaggattgcttgagctgggaggttgaggctcagtgagctgtgctccctactgcgctcagcctgggcgacagagcaagtccctatatcaaaaaaaaagaggaagcagcaatgctgggtgcacatttataattgtatacgatgcatttatcaacagaccatttctgctctggcgaggccctgatgagagctgaatactctgcttacaatggcacacgcccgaggaccgtcagagagtccaccgggcgcttgggctccgtgtgtttcagaccagcctggccaacatggaaaatctgcatccatgtgcagtgcagagcatggcagggtgcattctcctcctcaccgtctctcccaagcaccttcaggtcgtgatgccgaagaaaccatctatgcccaggtcttaatccataaaggtgcctaacagaggtcaacgctattgaaagggaagtctaacatcgctctggaaacattcgctagaaatgagagacatggcaggccccgcagggcaggggaagccgcaaccaggaggcagaaaggagcgagggaaaggccaagccacagcctctgttggcttcctgggaaagccgggcagagcaggggagacagcttgggatgggctgatttgtctgattctgggttccggggctgtcccttgtggtctggttctgggcctgggttgacactgggcagggaaatattggctgggggtacagaagatgaatgaagtggtttggagcaggggctctgggcaggaggggaggtgccaacagccctggtcaggaggttggccctgtcatcatgaccgcaagtagtcaaacgcaggatctaaggaggcacaaatcaaggacgaagccagcaggaaggtcagtggggatgagggggacttggggtctttcttcctctgcctccttccccttccacaccggagggtaaattgtgttcttctgtgaaagtcacaagaactctcagaacccagagagagttcatacacaaacacaggaaaagacacaagtcgtatgaccatctcaacagatgcagccgagtgtttgatgacactcactgtctgttcttaaggaaaagctcagccctctgggaagaaaagacccgttgttaagctgatgaaggccatctatggaaaaagtcagagctgccaacacagctaacaggaaaatgttgaaagctttctttacaagattggcaaggggacaaagacacctattggtgccgctgctattcaatatcagcctggatgtggcagactgcacagtgagttgggtaaagtttgtgaagaagaaaacaaaactgtctttattcacagatgatatggttgtgtatgcagaagagtccataatccacagggaaattctgaggattcagaggagtttagcaaagttgttgggttcaaaatccataggcaacattccattttcttactatatattagcaacaagttggaaaaataaaattataaaaagacataatagcacaaaatatcaagaatctaagaataatgtacaaggtcactatacagaaatgttattagcaggcattaaagatggtctaaacaaatggagataccatgttcatggattagaagactcaaaatgaattcttcccaaattaattaattttttccaaattgatttgtagaactaaagaaattgctatccaaatcctaaccaggtttttgtggaacttaaaatacttactctaaaatttgtgttgttttcgtttttgattttttttttttctttttcttcttcttcttatattgagacggggtttctctgtgttttccaggctggtctcaaactcctggctcaagccatctgcccgcctcagcctctcaaagtgcttggattacaggcatgaagcacttcatccagactaaaatttgtatggaaatacaaattcaatttgacaaatatttggccaggcatggtggctcatgtctataatcccacacgctgggaggctgaggcgggtggatcacttgaggtcaggagttcgtgaccagcctggccaacatggtgaaacccgtctctactaaaaatacaaaaattagcctgaaatcacttgaacccaggaggcgaaggctgcagtgagccaagattgtgccactgtactccagcctgggcaagagagagagactgcatctcaaaaagaaaaaataataaataaaaaatatttcttgagccccttagtccagggactgcttctggtacttgggatgcctctaagaaccccacccacaaagacccttcttcgtagaccttagcaggagagacacacagtaaagagtaaacacaatacataagcaaagtacccagtatggcaggaggtcataagtgttttgcaaaaaaccaagactacagaggggagggtcaccaggacatctaggggcagaggtggggtgagaatccaaccttccacacgggccatctctgcgacccatctctgtgaccccaacaagaggcccctcgccggccatccccgttccagcttctgatgtcctgatgtagaagcgtctcctctgcagctctgaggtgagaggccaagccctccgtgaccccaaaaggccagggctccccaagtgttatccacaaacaccctgtggggacggcaggctcctacaaggcgcccttgcacaggtctcttgcagagttctccacccactctctgggccctgacacagtgggagggtgcctgtccttaccccagccggatgtcccaccacactcctgcctggggacttctggcacgcaggagaggctggacacacagatgcagagaggcttgcccaacgccattgcccgttttaccttgaagttcgtggttctttaattcttgttccaaactgtgagtcaacctttaaaatatatgatattgaagttctccttcagctccggtctttcatcacagttaaatccagagatttcacgagcagtagataaatctgcagtagagaaaagtgctccaaaggtgggcgcgccaggctcccatttggagctgtttataaatgcttttatgtagacccctcctagatgacgaggaatggcctcagagcaaccctgggaaggatgaggaggggtccggggactccagacgaaatcgcacagccacctaccgtgtgagtggaaacccatgctgcttctgcctggcctctaggatccgcgttcaggggaagccgtgtccctggggtcatgagacgtgattgttcagaccaatggatgaggctgagcagaatcatttcatttcccccgcacttgccaagggcagggactttcccgtttgtccctgcctgatatgcaggaaggactcagaactacttaagaacaaatcaatgaacctatggctttatggcaaataccacagaaacaaccttagaaatgggctgaggaggctgtctggcctctaacaaatgacctcatctctctgaaccttaattcctcatcagtaaagtggcagtgcagcccctccctcacaggacgctccatggcagagtgcagccctgccgtgcagcagccggtatgacctcatccttgtgatcaggagggccctgctgaactgtttccgcccgcagtgcctacgaagcccgggaaatgatgtggccttcctggagccatgcaacagcactgttgtcaccaggaaaagggcctgtggcccgcctggccactcacgtcctaaatgagacaggccctcttcatcggcctcagtggctcattgagatgaggacttgggaattttgctgtttcacagagcaactgagcgcccaggtggctgccccagcagaccctggagacgtttcaggagacctgccagggacctaagcctctgccactgcaccaggccctggccagagggctgggctcagagctctttatttttttatttttattttttattttttagagacagagtattgccctgtctctcaggctggagcacagcagttgaaaccatacctcactgcagcctcgatctcccaggcttaaatgattctcctgcctcagcctccaagtagctgggaccacaggcatatgccaccatgccagccttattgttaaatgtttttggtagatcccatctccctatgttgctcaggctggtcttgaactcctgggctcaagcgttcctcacatctcggcctcttgagtagctgagaccacaagtgtgtgccaccgcacctggccccagagccccttttaaactgcaactcacagtctccaagttagactcacagagagaagatctaaatatgtgtctccttgagggaggctgaggagtggaggaggatgaactcttacaaaacgtcaacctttttaaaaatgtgttttcagtaattgctgttctgcgccaagttttatcctagtgggagtttcatgtcggaattactaagtaggagttcataacagacaagttaatcgcccttgtgtaggggcgaggcaccgagcaatgatctctgtacccaggtaggtgcttcctggatccacacaagcacaggagatggcaggtggggagtgggtggggggttatgaagggcagccgaggaggggcagggggcagggggaagcaggatctctgacggtagaagggagtggtcactacatccccaacacacccccttcatgtccccgctatagccacacaccacgggggaaaggctacaggccagcccccatcccctcaggaccatgatgcgggcatctgcagaaacgggtgggggctgtctggcctgagaggcctagagccaggaagaggtggtttagagctgccctcctcctccaacctcagccccaacccccttcctcagcagcagatcccacctgagtctctcctaggcctgttctggatccgaagtgggtatgagatattcaccatctattcctttgctccaccatcaccagaggctttgtggtaccttatttttgagaagaggcaacatattctaggactaggctgggaacaagggagaaattcatcatgcatccctccatttatccatccatccatccatccatccatccatccctccatccatcatccatccatccatccatcatccattctcccacctacccactcattccccatccagctacccactcatccatccatccatttggccattcacctaccaatccatttatctatccatccatccccatccatccatccatccatccatccatccatccatcatccattctcccacctacccactcattccccatccagctacccactcatccatccatccatttgtccattcacctaccaatccatttatctatccatccatccccatccatccatccatccatccatccatccatccatcatccattctcccacctacccactcattccccatccagctacccactcatccatccatccatttgtccattcacctaccaatccatttatctatccatccatccccatccatccatccatccatccatccatccatcatccattctcccacctacccactcattccccatccagctacccactcatccatccatccatttgtccattcacctaccaatccatttatctatccatccatccccatccatccatccatccatccatccatccatccatcatccattctcccacctacccactcattccccatccagctacccactcatccatccatccatttgtccattcacctaccaatccatttatctatccatccatccccatccatccatccatccatccatccatccgtcatccattctcccacctacccactcattccccatccagctacccactcatccatccatccatttgtccattcacctaccaatccatttatctgtccatccatccccatccatccatccatccatccatccatcatccattctcccacctacccactcattccccatccagctacccactcatccatccatccatttgtccattcacctaccaatccatttatctatccatccatccccatccatccatccatcaatcattatcgatccatctatccactcatccatctatccacctaccaatccattcattatccattcatccctgtccatccatccatgtatctacctatcaatccattcattatccatccacctaccaatccattcattatccatctaccccatccatccattcacctaccaattcttatattatccatccatccccatccatccatccatccacccactcatccacctatcaattcattcattatcaatccctctccatccatccacccacccactcatccattcatcatccatctatccccatctacccatccacctacccatccatccatccacccatccatccatccacccacccacccacctatcaattcattcattatcaatccatccccatccatctacccatccacccactcatccattcatcatctattgccatccatccatccacttacccatccatccatccaccccatctacccatccatctatccaccccatctacccatccatccatccacccatccacctaccaatgcattcattatccatctatccacccacccacccatccattcatcatccatctatccccatccatccatcaacccacccacccattcagcatccatctattcccatccatccatccacccactcaccacccatccacccatccatccatccacccacccatccacttaccaattcattcattatccatccatccccatccatctatccccccactcatccatccatccactcatcatccatctatctccatccatccatctgtccccacccatccacctacccatctacccactcatcatccatctgcctacccatccagccacccatccattcttcatctggatggacaaatcttcattgagcaccaattctgtgctgggcaacaggagacagagatgcaggaaacacaatctctgctctcagagaacatgctttccagggacaagaagacatggatagaagcaccaggtgaagatgctaggacatggctgatctgtggtccatatcctgttggggaaaactgggggcctggggatgttggtctaatgaagagaagacttggaggaactggcatatgctgctgagaatgtttggtgcccaccataatacctgggaggggggagggaggacagaggggtgaccacagtgaaaatgtggagggatcagtggagtgtaagcccagccattgaaggaatgtttaggtgaggcactgcagaagtcagctggacacaatcaggagtgtaagtgttaaagaaagaggaaagaaacacaaaacgcagccttggggtgacatatctctggccggagggagttatctcggggctggcatgcctctggtgagggaggggtttggaatgtttctggtctgagatgttatttgtggtttttggtcatgctgaccttagccattaggtgatgccctttggatttaggcggtttttgatcagggtgaacttaaaatggcagtgcttgtccaagatggcaatactcctgctgctggttggccactcggaattgtcttcgtggagagagaagactttatggttatgggccacaatatctagggtgtggccatgggagaggagggctggggtagttttgaggtaagaccatgaaaggagagcaggccagggttttgcagggatcaccccctggaaacggaaatcaccaaaagttataagaggaggaggagtgctggagagcgatgcggtccttgaggggcaagcgggtgtccatctccagttacagcacagtcaaggggatgctcaaagtgtgacaaaaaagagtcaaactctgtaaaatatttgaagagagttattctgaaccaaacctgagtgatcatggcccatgatgcagcccccgggaggtcctgagaacatatgtccaaggtggtcagggtgaacttcattttacacattttagggagacatgagacctcaatctaatcatttaagaaataaattggttcagaaaagcaagagagctagaaggcggggggtgggggggggacttccaggctataggcagatttaaaaattttctgggtgacaattggttgagttgatttaaagacctgggatcaatagaaagaaaatgtttgggttaagataaaggattgtggaaaccaaagttcttatttgcagaggaagccttcaggtggcaggcttcagagagaatagactgtaaaatatttcttatcagactaaagtgtgttgatgttaatgctggagcgataatcatgcaagtccgatccccacttcccatcatggcctgaaccagtctttcagattacattttaagagtgccctggggaaagaaaattggaaaggctcctcctctccctctccctcctctccctctccctcctctccctctccctcctctccctctccctctccctctccccacggtctccctctccccacggtctccctctgcctctctttccacggtctccccctgatgctgagccaaagctggactgtactgctgccatctcggctcactgcaacctccctgcctgattctcctgcctcagcctgacgagtgcctgcgattgcaggcgcgcgccgccacgcctgactggttttcgtatttttttggtggagacggggtttcgctgtgttggccgggctggtctccagctcctaaccgcaagtgatccaccagcctcggcctcccgaggtgccgggatggcagacggagtcgcgttcactcagtgctcaatggtgcccaggctggagtgcagtggcgtgatctccgctcgctacaacctccacttcccagctgcctgccttggccccgcaaagtgccgagattgcagcctctgcccggccgccaccccgtctgggaagtgaggagcgtctctgcctggccgcccatcgtctgggatgtgaggagcctctctgcctggccgcccagcctggaaagtgaggagcgtcactgtccggccgccatcccatctaggaagtgaggagcgtctctgccaggccgcccatcgtctgagatgtggggagctcctctgccctgccgccccgtctgggatgtgaggagcgtctctgcccggccgcccctactgggaagtgaggagtccctctgcccggccagccgccccgtccgggaaggaggtgggggggtcagccccccgcccagccagctgccccgtccgggaggtgaggggcgcctctgcccagccgcccctactgggaagagaggagcccctctgcctggccagccgccccgtccgggagggaggtgggggagtcagcccctggcccggccagccgccccatccgggagggaggcggggaggtcagccccccgcccggccagccgccctgtccgggagggaggcgggggggtcagccccccgcccagccagccgccccgtctgggaggtgaggggcgcctctgcctggctgcccctactgggaagtgaggagcccctctgcccggccagccgccccgtccgggaggtgaggggcacctctgcccggccgcccctactgggaagagaggagcccctctgcccggccagccgccccatccgggagggaggtgggggggtcagccccccatccgggagggaggtgggggggtcagccccccacccggccagctgccccatccgggagggaggcggggaggtcagccccccacccggccagccaccgcgtccgggagggaggcgggggggtcagccccccgcccggccagccaccctgtccaggaggtgaggggcacctctgcccagccgcccctactgggaagtgaggagcccatctgcccggccaccaccccgtctgggaggtgtactcaacagctcattgagaacgggccatgatgacaatggcggttttgtggaatagaaagcggggaaaggtggggaaaagattgagaaatcggatggttgccatgtctgtgtagaaagaggtagacatgggagacctttttcaattttgttctgtacctaaggaaaaattcttctgccttgggatcctgttgatctgtgaccttacccccaaccctgtgctctctgaaacatgtgctgtgtcccctcagggttgaatggattaagggtggtgcaagatgtgctttgttaaacagatgcttgaaggcagcatgctcgttaagagtcatcaccactccctaatctcaagtacccagggacacaaacactgcggaaggccgcagggtcctctgcctaggaaaaccagagacctttgttcacttatctgctgaccttccctccactattgtcctgtgaccctgccaaatcccccctgcgagaaacacccaagaatgatcaataaaaaaaaaaaaaaaaaaaaagaaagttggaaaggcttcaggattgtcagttaaatataattgtttttgcctgggtctactgacagacaggtttacatcgtctctattacttttctttttttttttttttttttaaatttgttttttgtttttgagctggagttttgctctcattgcccaggctggagtgcagtggtgagatctcagctcaccacaacttccgtctcccaggtcaaggattctcctgcctcagccttccgaatgctaaactacatgtgatccaccatattggctattgttgtattgtagtagaaacaggatttcccatgttggccaggcggtctcgaactcctgacctcaagtgatctgcccaccttggcctcccaaagtgctgggattacaggcatgggcacctgccagcctattacattttaaggtcataaaactgctacttctggaatatttcttaaacttgcttgatttgtctaaattgagctaaagctgtaaggtctggctgctgggctccctgaaaccttgcacatatcttactgtatgactgtatttcgttttgagtctctggattctggggtttggacagatgaccatagtgaggcctgcagaaatatgcatgtcctcagtgtttggactgccagctgcaagcaagccaaacccaatatggccccatcatccctggctcagctgtgctacctggccatgctggaaggggtttgatcttccaggaatttgcttcacagctctttcctgtcccaagatctatgcctgatgtgtaaattcaggacccaaaagggcacaaaaaagcaataactactaaatataaggaaaacaactctgtatacagcatgtataaagaaaagcaagatatatttggggagataaaagttgtaaaggcattaagatgtgtgtttgttgagaaaaaataaatttgtgcatttaagaagttaaaaaaaaaaaaaaaaagagtgccctggcagaggaggaagtccattcagatggctggggggccctcagaattttatttttggtttacaaaaagtttaggatatgggggacgttgctcatggctggtcaggagctcgagagtggaagggtttgagggaactggggatgggggaaggggtctgagaaggggatatacagagctgtctggggcaaggggtggcctggggggactcgaactttccatacagagggagaagcagcataatgagcttcatcctggggtctacagtggcagacagtggggaaagcagtgacagggagtttgccagcagaggaggcagctgagggtgtcttactcaaagaccctccctgaatgctgggagctgggaaggggttggttttgcccaagcacatggggtctcacttgtcttcaggcaatggtggctgcctgaggatagcggaggtcattgccctaggcaagtgggaaaactgcctcacccagaaggtcacaccctcccccacaacccagtgcctgattgatgaggggagggagaggagacacaaaatggtcctggcctcaaggagggacagccgtgagtgcagtgctcccgagctccccttcatccaaccaggctgaagcagtcacagccttgctcagctctctgcaccggctctctacccccactctcctttcctaggagcacccctccataatcacctccacaggaattccatctcagctctgcttccaggaaacctgacccaagacagaggttgttgcaagggcagagccacaggatctacaccagcctctgtgcgttcagtctgtgagcggcccaacgctgcccatgtgctcctccttaaagcctactcaaccctggggtctacaggcaaattcctcgcgggcgccttccctggtcctggctgccctctgcttcctttgcaagctccttctcgcacccttgcgctggctccctccagagggctccatcccctgcccactgtgccttcgtgggtggtgcccagatctctgtctcctctgccctggacccctctgcccctgactggcagatctatagagttcagtgcccctggaggtccacgtccatcccacaggacccggactctcatcttcctcctgagcgtgctctccctggagacctggcattggaattcgccctgccaccttctggtctccccaagtggaaacctgggcgtcagtctggacgcttgtcaccaaattctgtcccttccaccttcacatggcctctccatcttcactgcctccgtgtctctatctcatcccgatcaccttcgcctctcctctggcggagagcaccagcattcccactggtctctgcttttcctcaaacgcatctctgtgtaactctcccctcaggatcactctgtggcccccattgctctgggtggaatcttccttccagtggcgtttcagtcccctgggtctgcctcactcttcaccaccgtcttgtgcttctgcactgagctccagccagaccacctgcctgcagccacctggcgctacctgttcccgtgtgcttcctgcctttgcctggagagaataacaatctatagtccaaactcaaggacaaaaacaaactgctttttggccgtggtggcatgaaaccccaataagtcaatgacaatgctgcatgcttctgaaagccggccagtcagggacagccccacactacagaacaggcccaggcagcaagaaccttgtgcccctgaagtcaggctgaacactctcacttctgaaagctggacaatcctcaatgccaggcttcccaagagactcaatttgttttgctctgagagatggtcctataagcacagttccccttttctctcgtaagcaagatactcagcttcagcactgaccagcctcacaatccgtcctcaccaagtggagggccctcctccgggttcctccacggccgtatctgtctctgttcatacaccttcccctcagcacttagagacatgggctggcatggggggtgctggcggcaggggtgagaaataaactttcagccctagaggaggagcccaagaggagagcatgccgtcacctggagtctctggtatgtgcctggcacctgtactgattgcattaaccactgtgattttttagaagatgtactagtttgaaatgtataatacatacggagaagtgtatgaaatatgtacaatttaaagataaggaaaaatgcatgcctgtgtgcccaccacctagtgaagaaatacaacctggacaccactttggaagcctgtctgtgttcacccgtcgcattctccctcctcccccagcccaggtatcctccatcctttagccatcccctgactttctttagtttcattgcctgtgtatgcagccacgaataaaatattgcttagttatctgggaaaccgggctgtataggaaaagggctcttagaaccccacaccactgtcagatgcaggatcccagaagactctgctcccagtccagcttccaattcctgtgggtttataacgggcctttctagagacactgggggcaggattcacagagctggaacatttgcagttaggaccacattccagatgaccaacagggacatgcttgggggggataggccaatttggactgtccccttctaagcccaccaagacctacctgtagctctcaggagtggggtcagggcaaaacatgtaagtggggtaaaacaggtgacctctgattctaggaccaggagatgggagaagagcaggaacgagggaacacaaggggaaggcaggcacaggtgagaatctagccaggctcacctggcattctgtcctgaggcttaaaaacatgcaatgatggcaatgacagcatttgatctgtctctggagtcacttcgcatgaggtcattctccctccaccccctcctgggggattcctttacctcctctcccccatacatcccatattgggaacttgtttccagctaagatgcagtaacagactgaatttaccctcttgcctgaaacaactcaacagctggaaaaaaagaaatgaaacgatggctctgaaaatactagaaaagcagcacaggacagaagcagatcaccttgattccagggacctgaaatcttctctggaacaacacaagatacaatttaatgtaattagggtagcccagtgccacgcctgtaatcccagcactttgggggaccaagacgggagggttgcttagccaggagttggagaacagcctggacaacatagggagacctaatttctccaaaaaatttcaaaaattagctggcgtgtgacagacctatagttccagctacttgggaggctgaggcaggaggatcgctttagcccaggaggtcgaggctgcagtgagccatgatcatgccactgcactccagcctcgatgacagagaccctatccccccacgcaaaaaaaggaaatgaattaacattaattcctctcaagatgcccaggctctattcaccccctttgtcattgtccctccagttggaaattcctccctcccccggcaaaatcccgcccacccttggaggccttttcagatcattcttgccagatgagctccccttgtcccttctctgagccaaaggggcccagctgccgtctgtctccctccttccccttgtttcccgcgctacctccagggcacttcccaactcactggccaagcccccaacgagcggtctatgctaactttggctctgtgaatttcctagagtgtcatgggttggggaaaagcgcgcgaagtctgccttgcagcaggcgcgagagaggcgcttgggacgcgggttggcaggggcccgggacgtagggggacgtctgcgcggccctgcgtccccgggacaacctggcctgggcttacccacggccagggctccgggagggcagaagcgggctgggcaggctcctcagcgccaggcccgggcgcagtgccaaccccgcaacggcactggacatgcaagagtcggcgtcagtgcgcgtgaagcggagcattatcaggctcagcaaacgcggcccggttcttgggctttccgctctttctgtggggcagagagggaaagaggcctcgagtcgtgcgggctccaggctccgggctctgggtgaggcctgatccctgctcccacccggccaccctcattctccagttgtatcccctgccagagtctgcagcctcgggccgcggcgtggttgcctgggaaacgcttcgcctgcgcagggcttcctaggcgctggagtccgccggggcctcgcgctgccggccgctcacggaggaactacaattcccaggagaccgcgcggtgggtgggggcggggtagtgggcggggcatcggcaggctaggttttctccgcacccagtcgcagaggaagatggcgccgcggagggtcaggtcgtttctcgcgggctcccggcgctgctactgctgctgctcttcctcgggccctggcccgtgcgagccacggcggcaagtactcgcgggagaagaaccagcccaagccgtccccgaaacgcgagtccggagaggagttccgcatggagaagttgaaccagctgtgggagaaggcccagcgagtgagcgcggcccgcggtcggtggagcggggcctgggggcgggggccgtggttggggtcgttggagcggggcccaggggtcggaggcggagggggcgcaccgggcacctgtgcctacgcgccctgtccttgcacagcctcccccaagtgtcaggtggggcgccccgaccctttctgcagcaggaaaggtacccgtgccgcgacgacgccgtgtgaagcaggtggcggccggcaccccgagggtcagtgtcgccctccccagcctgggcggcctgctgacccgagcgtagggacagaaccaggctagatcacaggtctcctgcctcccgagcctttgcctgttccctcaaccttatctccctatgtggggaaacaagaaaacaaaatgttgggtagaaagagtgtcagggacagaaggaatccagtagcaagcccgtgcttgttatttgagcgagaaatgaggaggtgaggagatgggatcggtttagagcacataaaacgcgaccttgggaatgctgaaatcagtcttaacagggcgctcacctgacctctccttcatttgagagatgagggtacggaggccccgaggggaaagggcacccccaaggtggctcggccggtggggcccccgggacaacagcttcctaattggtgcgtgaccctgggccagctgctctcttcattaagatacggttgcttcatttcttaggtgttcctgaaaacacctgaaatgggtgttttcgaactatgccgaccatctgggcctcattatctcatctcaaatgcaggagtcagattagacctcaatagtccagttttaagcattcctgagtctttgagagggaaagtaaatgatttgcagaataagaaggaacttttggaacgaaaagggagaggagaaacaggtgggggacagacagacgacagacggttataagactgcgtggggatggggattgacgcctgggcatcagctccacaggccctccctgaactgctcctgggaccagcagtcaagccccaggcgtaatgttcagcctgcggaggtgggaggtgggagaacgctctgggctggagcggcagggcggcttcttggaggaagggattctggaggggctggggacacggctgggtttggatgtgttgatggcctcccagcagcagggaacaggtgtgaccaggagcagccgggatgcagtgctgcctccccgtgcccactgcactgggcatctgttgagtgggtggagtcccccctccccatgaggaatggggagcccgaaatagactccctgaccgattggaggtggcgctgaggaagtgcactcgggcccaggaaccccagcggctcccttttgggtgctggcccaagtcttccacctgctctgcagggccgccctggtgcgctccaccttacctccagccacctccagctggtcctctgtctttgtcagcccaggcctcctgcagcaatacacctgccctcaggctgcccctgcactggtccagctaccctcgggctgcccctgcactgtcccccggtgctgggtgctcgcctgaccagtttcagtcttgggttgggtcatgtctcctgaacctccctgaggttcactgggcaccatggtagggcgagctgctcacctccactttggactgagccttggactagatgatctttctgtcccttaatcctgaatctattgtgtgggcaagtcttttttgctgaacagaacgtgaagttcttcgggggtgagggtgttttgggggattttgtgtgtcttccccccttccagagagcctggtactatggcaggcaggcctgcagagcccattcgtcctgattttccttccagataacggaagcttggagggtggcggtgctgtgagggtgttctatcctggagccaagtgtgcaggcgtcagacccgtccgggtctttttgaggttctcagtggcggtagtgcatcccgggtggtctttgtgctgtggctctttctgccgagcgtgccagggcccagggtggtcaggaggcaggaggaccacagtcagttcaaacgtagggggagagaattgttcgtgcaaatagtcactccagtcggcttcttaccccacctgactcgccgctctaggtaggtatcagacggagacgggtcttggatcgccccctggaagataattgaggtgagggctgctttttcagagaagcacttcctgcccgctctgcagccactgctctcagcctcctgcgacctgcgctcagcagcaggacgtcttgtcctttctttggtttgcttcatgaaaacatcgtgtccctgttttctgcatgtaaagccacatcctggcatataggattgcgtagtgtgtcagtaggcatagggtgaagggagcgtttcaggaaacctttgcctttgatgggcttgggctgtgagacctgcgttgaggttgccgccaagaagatgctgagacccgctttcatcaggcgagacccggccgggggggtgctgcttcatcctctccagcaacttgaatcttgactttctgtgactctcccagttcctctttcacagcgggctccactgtgttgcaagactcctgagcagaggctgtccctggagctttggaggtcagaggccatgcagagcccttgtgctcacagacgacttctgaggactctgcctcttcagagctctgtgtgttgtgttgatgctgaggagtaagctccagggtctgcatggtccagctgcggcgctcagggacacactcgtgtacctcttggcctgggctgcacggtgccatgagctcggagtccttggccataggtccttagtttttttggttttttgtttttttgttttttttgagacagagtctcactctgtcgccgaggctggggtgcagtggcgtgatctcggctcactgcaacctccgcctcccaggttcaagcgattctcgtgcctcagcctcctgagtagctgggattacaggcatgcaccaccatgcctggctaatttttatatttttagtagagacggggtttcaccatgttggccaggctggtctcgaactcctgggctcaagtgatcctcccgcctctgcctcctaaagtgttgggattacaggtgtagtcccaggaggcaccgcacgcagacagtccttagttctgacatgaatggtgactgcaatgagagtgtgtgaagcatcttgttctcagaggtctgacgagtggaaactgaggtctgcaagaggagccctcagagccccaccccagctctcaagcgtcccccctggcttgagaagggcctctgaggatgggccagccagtggctccatgggcacctaggactcgccaggccaatgcatgacctcacagcagctcaaggcgggtacggctgtgccttgtccacggagctcaggtggaaggagctggggcacagggctgggctgggacagtgcatgccacctgccgtggtgagacaggtacagcgtgccaggaagccttggtcaccgccacagcctgctcctcatggtgggtgccttgcagtctggcgcgggcactcaggtgagcgctgggaggatggcacatgccctctgaagaggtggtccattggcgatcctggtggcattggaacctgcccagcctgaactgtgctgtgtgtgcaggttgacaccagtggtgtagctgtggaccctggcctgggtttcctggggcgttgagaagcagcagcaggttattggaaagttccagaaagctctgctggcacgcgggtggtgctgtgtgggaagggccactgctgaggtcccgagcagtgctgggcccttgggtctggtcaggaggacacggtcggctctgcttgtgtctggggacaaggaccggcgtcgtttgatcagctgagccggtttcttcctgcatgtataccctggttgttgaatttgcctcctgctcatgtttacaggtcttttctcagttggtttccacagggtacttctacttgatgcgttaacattaacttgaagaggtgaaagaatccagacgtgggtctggggtctgcacgtacctgctggtcttcctctgcacagagctggggctgctttttgtggtggtgctccaggctggccccttctgcgctgagactggcagccacacatcaggggaaagggagctggcttttgtgagacatgcggtgtgaaatttagaccccctgttgcctgagagttggggaatcagagggagaaaatgactttcccctgtgggttgcagattttacagcccacagagcacctgcccttgattctcccagcaccctagggaggcagacaggaagccagtgaggactgcaagttacaggggttggtgcctgctgtgagctgccaggatgggcccaggacttcagcagccctgggtcttcagtccgctttccagcaggcaccatgggcagtcatgggacacctgcacctctcccctgcagccaaagagggcagacccgggcccctcaaggccagcacacacttgagagctgggcctgaattgcctgccccagggtgctgcttctggctcagaccatcactgtgggcctcgcatctcagacctcccgggcagtgcagcacggtaagtaagcgcctacagggtagcagcagccacggggagtagagatggaagcagacctgttccccaggagtttgggtcacaaacaagataggcaggttgggctccccctcctcctgaggaccactgcccccctgagagttcagcgtcactcaggtgcctcattgtcctgggtcctcctgctgggaatgctcagatcagacctcaggtctcctagggccttccagtggacccgcaggcaagtgtccagggcacagaggggcacggggtggagctctggggagaaggggctgggtggatggggctggctgggtggatggggctggctggggaagaggcacacaggtaggggtgtgtcgaaggctgccagggaaagggttttcaggttgggacagtcctggaaagcagcccctgcagagatgggggcgcagagcatctaccaggagggcccagacaaaagactgtcctgggaccacccaccaagggttagagaaccttctagagaattagaagctttcctctgccctagccctgccattcattttgtgcctaccgtttgctatctttttaccattggggatcttggctcagtaatctgaattcgtccctaactaaattttaaactcctggagggtggggcctgtgtggctagggcagccacagagtcaggctgggcttctgagagaagagagggcggtgacagccccagcacccagctgagacagggcctgtggtcaggggtctccttcctcccaggcccaacacagactgagctgcagggagcaggatgggctcagtctagatacaggcagagtgaggcgaggaggttccggagtgtggggtgtgccaaacacacagaattggcttcgtgcgagtcttgaaagaaacgtgtgcccctgcgcggcgcggacctgagggctgggcctcctgaggtctcgggctgcaaggcagtgtgggccacaagcggcgcgggctgcggacatgggaaggcagccggctcttgacgcttcgtggggatgttcactgttttacgtaaactttattgaaatataacacacatatttggatactagcttgtgttgtatttatgttagaaaatagctaatgaaatatagataaaagattaatatttcaaacctctaagggaaaacagactccatatttaaacacacatgatcagagacaggcgttaggtgatgggcacctggagctcagaggcaggagctggggttccctcctagagccacgggagctcatgaggaccagccccgggggaatgtgagaatgcaggtgctcagggaaggggaccctcctgagagccgagagatttggggatctgcactgcacagtgcgagcacttcctttgctgcaggactccacagaggctttaatgcgctggcgtcactacaggcatgcggtgcagcctccccagttagccagggacagcaccctgtctccgtgaaccctggtcccacctcatgacacgttctggttcacacagctgggccactctctctgcacggaagagccttcgcttccctgaagggctagcctgccccagcgcacgcctcttagcggccggccagccccgaggccagagttgatgagagctggccggtgggtttcattctgctgcttgcctcggccgcctggcattctggcccagtcattctgacgtggggacactcttggcctaaatcctgtctttgcaaccaaaaagcagtgtgcccagcggtcacctcacttgcttccttctctcacccagggtccagagctgggagggcaggggtgggatgaatgaagcgtggcctgcctgcggagagggatgagggtggggcggggaagttcctcagccccagtgcgcatcattccggggctgcctgtgtgtctacgccagcaggtaagtgagagggtgacagattcctgctccagaaggatctggggctgtgtaagaaccgtctcagcaagacagttcggatcatggtacacttgagaggtggtgactgagggtctttgggaaatgaagatggggcagatctgagattacagtgattttttttaaaaaagaacttctaggtgtctgtgtccttgcaatatgtatctgcaatggtaatgcagtgggtatcttcttcctgctctgtttatccgagtgcccgatgactgtcctcaggtgctagggtggggtgtcctgttacagccggacaggaatgagcagccgctgctggtggggagcccccgatggacttggggtttccggatcgtgtatacagacaggcctagagactggtgtccatgttgagttcttgtctaaacctgtggggtttgaatcctgctgacagtgaccctgactccacctcttcctggtctcccagaacctcccggtggccagcctcctccgaggtcagtttctcgctgtgtcctggtccgtcctgctcgtggctcacaggctcctccccttcgttcgcagctgcatcttcctcccgtgaggctggccgagctccacgctgatctgaagatacaggagagggacgaactcgcctggaagaaactaaagcttgacggcttggacgaagatggggagaaggaagcgagactcatacgcaacctcaatggtacgtttgtttctttcctaatgcaggtcgagtatccctcttcctaaatgcttgagagcggcagtgttttggatgtcggattttgtttttgatttggaatatttgattatgcttaatctggatatccaaaatgagcctttccccgagcatcctgagtcccagaaagcttagatttgtgttgggggctcaccctcatgagggaggtggccactggcttcagtgtttgggggggctaaccctcatgagggatggtgctgctcgcctcagtgctgtggtacgctctgactccttggcttttgccaaggggccattggcacagcctgcggggggctatcctccgagcacagatgcccttggccgtggtctcagtttgctgtcacagatccattgacgccagaggagggccaagcaggggctctgggtgcaggaaggggcgagacagcagaggctctgtacccagaggaggaagcaggtctgccctagcatcttgaagttttggggacatactccagatgtcatcagaatggacacttggttgtcatgcgcttagtgagtcctcgtccctgtgggtattcaagaagaggcaggacagtcgcctgcttggtaccagcatacggaagacaggtgtgtcctcagagccgggagggttttaaatgacagagttgcgactgttccttttggacccctctcctccgccatcctccctcaccacgggcccgtcggcagggcactggcgggcagaggacgcacaccaggtgggcccgtgggactggggttggggctgctccggagagtcgagtgctcagctgcctgctgtcagctatgtgtagcagccctaggagctgctgtgcctccacccaactgctgcccctgggcctgaccccaggcaccccttccccaatcccctcccccgctgctccctgtgtgacctggccccggcacagtcccctgccccccacctccgtttcctcctcctgtctcacaggacggtggtgtgaacaagtgggatatccccactgtggtgggggtgggggtggctgccatcgcacttgttgctgtcgtgagggtggccccagagccctggccatgtctggagtctgctgtagccctgcttttcacacgcgctgatggcctcaggcattgcagcgcccgggttgtctctggtaaagagaggaggtgtctacggagttccttcgttaggcctgatgctctaacacctactcctcaaaactcgttgtcgtcccatttgacaggctcagagagggtgatttgtctggagttgcagagccgagtagtgcagcaaagatttggagtcagggttttctgactcctgagcaggtggtctgttcccagccacccctcttctcccattggcaggcatcagcagacatgtcatgtgtgcgcccgggttaaagacagagggccggcttcatttttgctggtttatgccaccatgttcaagagtctggttgagacgtaagccaagatacggcggcagggactgcctggggaagagagacatggctgaaacaattctggatggttgcgtccccaccagcgtgtctagtgggccattcccaagggccaagaaagagcctgtcctggaggtgcccccaggaagaagggactggctatgcagcagggcagcattcggggcctggaggagacagagcagcttgcagggggcacagaagtgggctaagaaccagctccctcctgcaggcaggagtgtcttgcagggtgtccaggtctgtggcccaagtggagctgtcttgttttctgccattgcctagtgacctggcagaaaacttagtgggactctaggagccggcgtcccagaagcagaccctgcccacactcaggaaagaggctcgtcctggccagttccccgccatcttctgggtgtggtccctggacccccgaggtccccgtgccattatcaagtgtgataccatacctgggggaccagccatagccaggtgtgcctgcccttggcaccctccatgctgaggtccaccctgagacagacgggccacgctccactctgccctgccctgctctgctctggggttcgctcctgtcctcacccccaccgcgcccccagggccacttcactccccaggcagggagtgtggggcggcgtccgtcctccccaggcagggggtgtggggcggcgtccgtcctccccaggcagggggtgtggggcggcgtccgacttccccaggcagggagtgtggggtggcgtctgtcctccccgggcagggggtgtgggatggtgtccgtcctccccagaggcagggcgtgtgggatgacgtccgtcctccccaggcagggagtgtggggccgtgttcatcctccccaggagctctaagggctcgtgctcctgaggccgcctccagcttcagtgctctgtgactccattccatgcagaagaacccagcacctccagaatccagaaccttccatagtccctgtgtgatcgcagccgtgggtactctgccttttgatggggtctgaccagccactttgggctctggctcagagcttttggctccaactaggaaggcttgagccaggctagcctcagagccccaggacatggcccaccctccccgtctccccctctcctcctctcgggctcaggggtgcacggcctgggggtgggacctcagtgctgctgagcagtggctggacttgggggtctgggcaggacgccttcacaggcaggcctggcactggctttctaaggccaggaggcatccaggccacttttttaaaaagtttgtgtattttgtatgtatttatttcatttattttctcatcccccacagccggtattatttatttaattatttatttattttaaaagatggggtctcactttgctccctggctggtcttgaacacctgggttcagacggcctcctgccttggctcccaaagtgctgggatcacaggcatgagcaccgcgcccggcctaaaatattatttcaggtataaatccctgccatggaagacaggcccagcatgtggttgagctttgaagcatgcatctacgggacccgtgcccagcgccaagctcttgactgctgtcaggagagacggctttcctcagggacaagaccacaggctggtttttcacgcttaggaagatcacaagcgcttccaggctggaacacaagaagcacatgctgcgtgtggccttgagacccccatggcccaggcttccggacagagtgagacaggagggatcagaggccagggtggtgtcgatgagaaaggaggcctgaggctttcagggtgtccctcgagcagggacactccccagggctggcagtgacagaggatggacctttgggagaggtgcgggggtggggcctgctgagcccagagcatgtggaggccccgctgggagtagttctgtccagtagggtcacgggtgaaggcccagaggaggcgctggggtccgggagtcaccatctgggtgaagaggtcctcggggtgaggggaagtgtgaggcgaagggaggctccgagcccagcatcttgggagaggcctactcgggccctctcggcccggaggggaaggcaggaccccattctgtgggaggcggggccctgggagaattcccccagcccccaggaaagggcgggcaggcaagcccaccgcccgctaaggaggcgggtgtggttgcatgggccccggattccaggggacctagtagagggcctgtcacacagagccacagcacaggacttggaagtgggaattggggcctggggagagctactgccgtggagggcgaggccagcccccaggctctgctctcacatcccaagtgcaggacttgtcctgttggcaccaggcccgcgtcgagcgcctgctttcatatcatgttggtggcagcgtgtggtgacagacacagcccacagatgccgagtcccccctagggaagcggggctaggggagcaccacgtgggcagatcctagagggctccccgagtggctgggcacagcacactgcagactatttattcctcctggctgctaccagtaactttttgttagaagctgctgacactgacgtttctcctttagaaactgtttttcctcccaataaatataagatgtgtgctgtcagaaagccctgccaccctgcacagtctgcaggtggcctctgtcctgtggtccttagagtttttgccctatggcagcaggtgaggctgcaaattttgttcttgaaaatctgtgcagctggtcgctaaagacgggccaatcggtaaccactcttacagcccagcccaccagctgctttcgacagctgcgtctcagggggacacagcttgatggaggactccagccggcgtgtccctggtaggaaagagggaggtcctgggggtgtcccgtgagtcgccagacccgttcctaagtgctgggagaccacagaccccacgcttgtttacattcttgttctccccagatctccagtggtcatccaggaaacaggtgaaaggaaactactggaaaatgagaggcaaacctgtctcacccaccgtggcaacccagatgtgttggcttttgactgtttttcacaggaaaccatatcaaatagtacctcccctctctcctagtcatcttggccaagtatggtctggacggaaagaaggacgctcggcaggtgaccagcaactccctcagtggcacccaggaagacgggctggatgaccccaggctggaaaagctgtggcacaaggtactcttcgattgtttgcataccttgcagaattggtgccgttacgttgagtgttaaggcgggggctgtgaggggcagtctctgctctgcatgggagccggggtttgggaaagtctcaggaagacggtgcttcctaaggaagcattccactgtcattctgtgaatcttttcagctttcctgtttagaagattccttgctctttgagtaaaggagctctgtttggctttgcctgcagctgtcagaccttcagctcaggtcacgtgtggttacgggatggtgacgtagcatgggctgcgttctttactccgtgtcggatttttaatgtagtgagtggtgccgtggacgtgcctctgtgattagaaaggtgccctcgtgtgtggggctgggctttcaccctgtgcctgggaagggtgcggggccaggcgctgggacccagcagggcctggtgggcgtggcagggtgtttacctgccgcagctcccccatttccagcggctcctgctccagaacagtttctctggatcacattgatttggggtcaacagttagacttcttgtactagcccagtctcagctcaatgtcctggccaggagagaggagtcggtagaagggggcagagagggagagagggccctgtgtggctccctggacgtgtgtgagccacgtcatctcacaaccaggaggcaggtgggatgacaatgaggggctggcagaggtccccctaggaaggtggccttgctgtcctcaccacctgcagccgggagagccagcaagcccggagtcaccgggctgctgccctgtcccccccttgggatctttgtccccaccccagccagctcggtagctgtccctgttgagcctggacacgtccaagagaagggtggtttgccggcagctcttctccggtttgttttttgttttcctgcccttcgtgaggccaagaacctggcctggcactcacgtaggcaaggcctgcctggccatgaggagtggttggctgaagagcgccctggccacacgagcccgcggcgggttcactccaggccttgtttccctcttaggcgaagacctctgggaaattctccggcgaagaactggacaagctctggcgggagttcctgcatcacaaagagaaagttcacgagtacaacgtcctgctggagaccctgagcaggaccgaagtgccccccgcccccaccccctcctgccctctgccccaccccctcctgccccccacccctcctgcacctgaggctcgttgtgctcagtgggcagcctcagctcccctcaggaacacggcaggtgcagggaggcggcaccagacgcctcccagggttccaccggacttgtgagtggggaggttgctgtgcagaggctctgggagtcgcctgcctgcattggatgaaccaagtctcaccgcgcctgcccccactatgggacagctgctgcctttgtcagacctggctcgctaatgggtccttcattctggactcgtgaccctccccaaatgtgtgactttcccaccccacaaagctggagtaaaatggagggtgacccagcagagagggggcagggcaggggtccagagtcagcccccaggggacctggtgccccagctgtcaccgccaggcgccacttggtgcgcgtgtcccggcgtctcgcctgtctcgcctggaaaggaagctgtgccaacggtcgtttctgcggcgctgcaggaccgcggaagggggacattttcagcccagaaatgagagcgagtttgagctccccagcagtgggcgttctagacagtggtctgggcaggcagtgcgaggactcccagcctcatggcgtcctgcttcggttttacagaaatccacgagaacgtcattagcccctcggacctgagcgacatcaagggcagcgtcctgcacagcacacggagctgaaggagaagtgcgagtcaaccagggcctggaccgcctggcagggtcagccaccagggctacagactgaggctggtgagtgcccgcccggactgttggttcccgagggtggggccgtctctggttgtgttttggggacaagcaggcaggtgcttgtagcgacgggaacctgggcctgtggacgcagcggagaccctcgggcgctcagtctacccaggggtggtcacaggcctcgctcccaggagctgctccgtgaaggtcactcgccgtccccagccttgtacctggagactagcggagggcagtggcggcaggggcctgggagcagcccttcccagcgtctccccagcctcagcagcacggcccctcccgtgctgtgttggccaagaacagagactactcgtcaaacatagctccgtctccatctcatgccacccacaccgtccatcagtccccctcagcccggcagggcaggacgcccgctgaggccacagagcttgtggctccgtctcagcagctcatctccctccactgcaggccctcagtggccaggctctgcaccactgcttcttgccccgtacccgggccagagccttgtgcagggtgtaccggaagcctgctggcctcactcacgcagcttccgattctgtacctcatcctccacgtgcacactgagcaccagctgcacgccaggcactgctctaggctcgaggaggcagcagcgccaggagatggcatctgtgccctcatggtgataagacagcagggctggtctctgtccccggtgccaggcagagcaccgcctagtctccaggatggtctgcccagaggcagcctccagcacagcagtcaaatgtgtccacgcgggcccaggtccccttgggtggctgtgctgctgtcacctgagtgcccttgggaagacccctcaccacccacccccaaacccaggctcccttagcctgacctggtgctggtgactgtgtcagccgtaggttttggccgtagtgctgggggctggaccaccttgtaggcctgcgatgcagtttgctgagtgcctgtgctggagagacccggatgagcctggctatagtccatgcaggaaagggcgactcagccccacacacttctcttcccacctcgggctgtcctcaaggcagttgtgtccagcggctcctgcagttctcttgcgggtctgcctgggccttccagcaagccccaccagcccagggtcctcggggtcctgagcaggaaggggtcagcagaggagggagcaggggccactgttgcggggctccatgggcaggcggctctggactactcactcctggttggagagtggtgacagccccggagtctctcactgcgtcccttcgtgagcaccggggtccaggagccgtcttggtttgtttggctcctcccaggagcccgaatgtttgactttcacgagcacaacatcctgctggagaccctgagcaggaccgaagggaaacggcctgtgcctgcgtctggacctggctgaacttgcaggtgcccccacccgaggtcctggcagccgctgcacacaggccacgtccatcctctgcctcctgcttcagaggcagccagggcgggctgtggcgcttcccaggctctgatggaagcaggtgtttctggacacaaaggagaagcagttgtttggccaaggggacagagaagccacatttcagcgaggtcatgtgagctactgacctctctgtgccccataagccccatgtgagctactgagcagatgccctctgtgccccataagactttgagtgcacgcacccgtgtttcacacacatgcaggtcgcgcctgcaaaccctcataggctccacgcacactcagcgtggttgccgcggggctggctgtggtgtgcaccccgggtgctgctgaggccactcttgctcctcccctgcagagttcgaggagcccagggtgattgacctgtgggacctggcgcagtccgccaacctcacggacaaggagctggaggcgttccgggtaaggaaacacggccctctccttctagctctctcctgtggtgaagatctcttgcatttccggtaagaaatgcagccctctcctccaagctctctctctcaagattctcgcagtttcttccttaaccactcggtgaacctgcttgcgttttccttctcatctgcgtgggaactcgtgtttcaggggcggggccaggctctggagggaggggctttggttcttttgtccgtgttcacgtctgagcgtggccttggtgcgggtcctgtggatggtcaacagttggtcgggacccagccacagcctggggggaggggaccaaggacactaccgggatcgtttagggtgtaccacttgctgagatggaggcccagggagggaaggagaccctcaggtggcaggggctcctggggcgtgtggagtgccagatcattctgagggtggagaattcatcagctcggtgagcacccagcaggctgtgaggagtggggagtcagcgggggtcctgggtgggcagccttgagtatggtatccggccatgagttcacccagggtccctatagctggtgtctgttgggagggaggtgggtgtggtcctgccctcataggacttgggactttcctggccccaggaaggccttagcacctcccccagaaaggggtcaggagcttccctctggggctggggcaccttagctggccgcacagtgcatggggcttggcaggtggggccacatggagggccctgggtctggagcgtggggtcaaggcagggcagggcacctacaggagcagggacagagctgcagtccagcagcagtggagcccaggcaggctgggggcagggtgcagaggcagccaccacagaagcacagcccctggacatggggtctggctgggaacgagctggaggccccctagattcggggggcgggggtgccatttgcagagacagggaaggggtcggcttagggctgccaaggaggcgcgggctgggacccgttgctagtgtgatggcctcccagtgccgccccctcattgcccatgtcaccgcaagcctgtcctgccccgggtatggcgccgtcccttggcgtccttgcagttcacccgggaccacaagatggcgtggcgagcacggggagggaacactcacctatggaaaccttgttccaggaggagctcaagcacttcgaagccaaaatcgagaagcacaaccactaccagaagcagctggagattgcgcacgagaagctgaggcacgcagagagcgtgggcgacggcgagcgtgtgagccgcagccgcgagaagcacgccctgctggaggggcggaccaaggagctgggctacacggtgcgcacgggttccaggaccggggaggccacagttcccctgcaggaaagatgaggccgcccacatgcagctcagggcttcctgtagatggggtgtgggccccacgctgttgtcttccctgtccgagttgaaccccagggccacaagtgtgtgggcactgaaggccacagcagccatgctaggggagcccccgggcttgtagtgcagtcccccgaccctcaggtgagagcgcagcggcggccactgcctcgtcctcctgtgacaggatggggcgtgacctggatacccacagccagcccatgagtcagggcactctccagcctttgagacagcgagcctccttccccacagcccctgggatgtgaggggaggagggagagcccaggagaagtgaagccagcgacagccttgccacagaggacagaaaaccctggaagctcatgccaagttctttctggagggagctggctcaggagcccattgtgccttttaaactttgaactgcaggcatgtgttaccgattcaaaaataggaaaggcctaaaaaataaatgaaggtagaagttctgataggagagggtggtgcgggtctgcctggcagaatgtgcaggagagcacctgtgcttgcccgtggaggagctcaggtccagggtgagcaccaccatgtggggtttgcagggcgtcccagacgcggggatggaatgctagcgtgcacctagcttcacctgaccacggcaaagctcggtgttggttaagaaagccgtgtggcactcctgaggacccgcaccgttggggcagaggtcagggccgctgagagaagggttcggtgagttattcaccctgagccacgggcttctatgtggagagggaggtggcgcccacgagcagggttttgtgagaatctggggagagctacagtgaccccagcccaggctggtgaccagcacctgctccactggggtgtatctgtggggatgctctgggctgttgtgatgtgaggagctggaggtccctctccttccctcccaggccctgaggaggaaggcgcctttcccagagctctgtcccagtctctctggtcattgcttttaaaaataacactgtggggctgggcacagtggctcacacctgtaatcccagcactttgggaggctgaggtgggtggatcatctgagctcaggagttcgagaccagcctgggcaacatggtagaaccccatctctaccaaaagtagaaaaaattagccgggcgtggcggtgggcacctgtagtcctaagtacatgggaggctgaggtgggaggatcacttgagcctgggaggcagaggttgcagtgagctgagatcatgccactgcactccagcctgggtgacagagcgagaccctttcagtaagtaaataaataacaccatgggcctatcacagagaccctgagctttccacttcagcatgaactgctcctggctggtggctcttagcgttctttggtgggatttctagttagcactgagctgcttttgtgatttgagctttctggatgggtgtggaattggaaagtcagatgtgcagggcttgcgccttttccttttggatcgcgcgtctcctgacatgaggctgagctcacagagctggcctcgaggcgcgctgtccccagctgatgagacgtttctgtccacaggtgaagaagcatctgcaggacctgtccggcaggatctccagagctcgcacaacgaactctgaagcactggggagcccagcccggcagggaagaggccagcgtgaaggacctgggctcttggccgtggcatttccgtggacagcccgccgtcagggtggctggggctggcacgggtgtcgaggcaggaaggattgtttctggtgactgcagccgctgccgtcgcgacacagggcttggtggtggtagcattgggtctgagatcggcccagctctgactgaaggggcttggcttccactcagcatcagcgtggcagtcaccaccccagtgaggacctcgatgtccagctgctgtcaggtctgatagtcctctgctaaaacaacacgatttacataaaaaatcttacacatctgccaccggaaataccatgcacagagtccttaaaaaatagagtgcagtatttaaaccacccgcttgttggctggtcactaagtgtcctggtggctggggccggagccagtgctcgtgaagggatcgcgtcatagccagcttcccctctgggcctgtgggctttgcagccaacctccttttcccgtgagacgcccggcctgatttaaagccaagagcgcttgagttgagtttgaggggaagatgtggagcgtgtggttctgtggacagtcagagactgtggcctgggggagcgtctttcaactctcacctctgcagctcagggacctcgggagacctcaccaaacctgcagggcctccgtgtccctaatgtgctgtgtaaatgccccatctcatgggggagagacagccacggaggccttcctctgaccatagctgatggactggcggttgctcaggtccggctccgagaatgttcctgtgtctgagcctggaagaggctcgggtctggctccgggcgtggttcccttcccgtgtctgagcctggaagaggctcgggtccggctccgagcgtggttcccttcccgtgtctgagtctggaagaggctcgggtccggctccgagcgtggttcccttcccgtgtctgagcctggaagaggctcgggtccggctccgagcgtggttcccttcccgtgtctgagcctggaagaggctcgggtccggctctgggcgtggttcccttcccgtgtctgagcctggaagaggctcgggtccggctctgggcgtggttcccgtgtctgagcctggaagaggctcgggtccgggtccagctccgagcgtggttcccgtgtttgaacctggaagaggctccaccaggcgtattgtgttttgactgcagctggatcttggcttgactgttgagatctgccaaacatccgctaagctatcattctgagaaaggtcaaggctagaggcagcatgtcgggagttggcgcatcagggttggaagggccccagggtacagcatgtgggtgcctgttcctttgtggacttgtgtgtgtgtggctggtggggcggggggtggattctggttcttttttttcccattatcctgagagccttaaggtactcagtgtgttggtgagactcagccctgtcatctagcagaagcgtgttccttttcattgctgtatagtattccattgcatgactgtcctgtgctctgattttaatgcactttattgtgggtggatatttgagttgcttcctttctggggtaataacactcacttggaaatagctgtggtgaacactcgtgtgggggtgggggtgggggccaactctaggagcacctaatggatcttacgaagcgtgttgtccaagtatagagatgattccaaagtggttggactgtgtttctttctcccagctgggtggaaggagaacactagtggattgctgagacttggtgctcggtatttttaattatggacagcctggctggcgttttgtggtgtctaattgcggagtagcgtgtcttactgtataatggcctcttttgtatgtgggagaccatggtgttgaggggaggcagttacacaaaaagcccagataccgagtgttagttccatgggtgtggctggtcatggtgcgcactcacgaaggatgtaggtgatgccctccactccgcagagccagtcccacaggggtacccattctgactcctaccaccacagctccctacctcccgcctgccatgggttccacgtgcatggctctgggcagtctgtgtctttgcgtgcgtctgtgtatgtctgcgtgtatctgcttacattcgctcagcatctgagattcacccaggcttttgcgtggatcagcggcagactcctgattgccgtggcgcctgttgtgtgggtgtgtgccgcgtgtgtatccagtccctactcaggagtgtacgtttccatgtgggttgcatcaggtcctttctcccttaacttcagattatttgctgcataggcttttttctcctaatttggcgcctttgtcagaaatcaactgacctacctgtgtgggtctgtttctgtttgtccttacgctcttgccattgccacactttagacaaggtcttgctctgtccctcaggctggagtgcagtagcgtgatctcagctcactgcacccttgacctcccatactccagcaatcccctcgcctcagtctcctgagtagtagctgcgaccacaggcgtgtgtcaccacacccggctgattttattttttttatttttattttttttgtagagacggggttttactatgttgcccaggcaggtcttgatctgggctcaagtgatgctcctgtctcagcctcccaaactactgggattacaggttgtaggtgtgagccatggtgcccggccgccacactgtcttggctacagttgggtttataataaaccctgaatcgaggtgatgtgcattttccaactcttctttttaaagattcttgtggctgtttatgccttggtgtttccatatatgttttacaatcagtgtctcaatttctaccaaaaaaacatgccttctggaatttcaatagcaattcccttgaacgcatttttgaataccttttctgaatgtcttgaatacatgttgggaagaatcggtgtcttaacagtctccagtgtccacgcgttgactgccgtgtgtgactccagtcggcgtctcaacagtctccagtgtccacgcgttgactgccgtgtgtgactccagtcggcgtctcagcagtctccagtgtccacgcgttgactgccgtgtgtgactccagtcggcgtctcagcagtctccggtgtccacgcgttgactgccgtgtgtgactccagtcggcgtctcagcagtctccggtgtccacgcgttgactgccgtgtgtgactccagtcggcgtctcagcagtctccggtgtccacgcgttgatgccgtgtgtgactccagtcggcgtctcagcagtctccggtgtccacgcgttgactgccgtgtgtgactccagtcggcgtctcagcagtctccggtgtccacgcgttgactgccgtgtgtgactccagtcggcgtctcagcagtctccggtgtccacgcgttgactgccgtgtgtgactccagtcggcgtctcagcagtctccggtgtccacgcgttgactgccgtgtgtactccagtcggcgtctcagcagtctccggtgccacgcgttgactgccgtgtgtgactccagtcggcgtctcaacagtctccggtgtccacgcgttgactgccgtgtgtgactccagtcggcgtctcaatagtctccggtgtccatgcgttgactgccatgatgactccaggtattgagttcatcttcaacttctcccaacaatgaactggagttttctgtgcatgtgtctggcatgttttcctttagatctagtcctaggtgttcgatatgctattgaggactgtgtatttttatttcatttgtcacctgtgcgtggtgctttaatcctgtgccctaaatcccgccttggcatggcggtgtttctgtggactcgtggggtttcctgtgcacaccgtgtcctctgtctgacagtggctttgcttccccttgtcagtctgtgcctcggcttctcactgcactggcgaggtgagccggcgcttgctaatcttattcccagtctcggtgaacatgggctcagtctctcccggctcagtgttgggtttgcactggtcacttacaggcggaagagcttcctcatttgctgagggcttttcctgaatccgtgttgaatgtggtcagctgcctttcctgcacctagtgagatgctcatgaggtcacttccttaccgcattactgtagtgaattacgctgactttcatatgccaagatgacctggcatttccaggtaagtccctgtggccatggtgcattggccttttctctgcatggccaaatgagatttgctcataccgggctaaggacctcctgtgtaggaatgctcttgagggacactgggcttggatgttcattgtcttgtcatgtgatgtgtctgtcatggtttgatattgcattaagtgggcctcctgaaacaagttctgccatagtttgtataggattggcattatttgtttcatagagatgtgatgggtgaggccatctatgcctgccattttctttttgcttaggtttttcattaagaacttgatttttaaaaatagacatgaggcctggcatggtggctcacgcttgtaatcccagcactttgggaggccaacgtggatggatcacctgaggtcaggagtttgagaccaacctagtcaacatggtgaaaccccgtctccattaaaaatataaaaattagcagggtgtggtggtgcatgcctgtaatcccagctactctggaggctgaggcaggagaatcacttgaactcaggaggtggaggttgcagtgagctgagatcacaccactgcactccagcctgggcaacagagcgaggctctgtctcaaaaaaaaagacatgaggcttttggattttctgtttcttcctttgtcatttttttaaagataggtttgtcgcagaatttcatctaagttatcaaaacaatttacataaatcattcacagtatcctctgtgcagtgatgtccattctcattcctgctctgggccatttgtgttttcttttccccctgatcagactagctaagagtttatcatttttacagatattttccccaaagaaacctacttttgggtccattgatttttttttttctattgttttctttttcattgacttttgctcttttcttatgaatttcctttcttctacctattttgtgttcaatttgctgtccttgttttaggttcttttgatagaggcttagatcattgatgaagaatatgaaagaatgggataatacagttaaaaacttggtctacttatgcccattagagaaaacattcttaagcacgcatggaatcttttaaaaatggacgaggtactaggacccaaagcaaatgtcagtaattcgcagatgataatgtataaatatatgatatgtaggtaaataatacaaatcacattctttggccagagtgcaattgaggaggaaatcagtaacaaaaagacaattaaatccatttgattcttttgttttcgttttgtagtaacttgcacttccctggtgccagaggcatgacacctttttgtctgctcttggccatttgggtggcgtctttgggaagggcctacttaattcttttgcctatttaaaaaactgggtcttggaaatcttgtctttttttttgagtcaggatctttctcgcacaggcttggagtgcagtggtgcgatcatagctcactgcaacctcaaactcctgggctcaagcgagcctcccacctcggtcttctgagtagctgggactacaggcatgcatcactatgctctgctaatttaaagaaaaggttttttttatagagactgggtctcgctgtgttgcccaggctggtctcggagtcctggtctcaagtgattcacctgcctccacctcgcggagtgccaggattacaggtggcgggagccgccacacccagcctggtcttagcgttattcccaggtctaggtgtgagtccttcctcagatatgtgttgtgaataatttccgatcctctggcttgctattttactttcttaatggttatcttttggaaagcaaaggtttccagtttgatgaaatctaatttttattttttatttttccgttctagtggtctttctattttctcatcaaattgagactttggggaaactacacagcagcaaaccaggatatatcctcttaaaaacagctcgagccggccgggtgcggtggctcatgcctggaatcccagcactttgggaggtggaggtgggcggatcacgtgaggtcaggagtttgagaccagcctggccaacatggtgaaaccccatctctactaaaaataaaaaattagccaggcatggtggcaggcacctgtaatcccagctacttgggaggctgaggcaggagaatggcttgaacctgggaggcagaggttgcagtgagccgagatcgcgccattgcactccggcctggggacaagagcaagacttcgcctcaaaaaaaaaaaaaaacccagcttgagccaagtgtgggtggctcccgcctggaatcccagcactttgggaggctgaggcgggcagatcacttgaggccaggagtttgagaccagcctggccaacatcacaaaatcccatctctactaaaaatacaaaaattaaccaggagtggtggcagcatctgcctataatcccagctactcgggagcctaaggcacgagaatcacttgaagctgggagacagagtttgcagtgagccaaaatcgtgccattgctctccagcatggataacagagcaagactctgtctcaaaaaaaaaaagcttgaaaatttaaaaatatctcaataattatgagatgcagtgattttttttttacttccctaagctgggtttccaggtatctctaggttcagctctccggggctggaagtacatgaagggcagcattgcccaccttgaccagagcaggctcggagcagggcagtggaagagctggtcccagctcagcccagcctgctgggtcagcatccatctgaaaggtcatctctacccaggaacttgatggcttccagctccaccctaacagaaacctccccagcatcttgccgagttgtaatccagggtggtggtatagacggtcttggggtagagtggatagacggtcttggcgtagctggtatagacggtcttggggtagctggtatagacggtcttggggtagctggtatagacgggcttggggtagctggtatagacgggcttggggtagctggtagtggtgctcagtaggtgtgtggcctcctggtgcagctggaagcgcacttcagccatggtgttgtgccaggtgtggttggggatgcaggggacgttccggccgcaggaggcccctgccaggcacaggcagctgcgcggtgtggaagaagtgccgctcggagtcatgcttgacaaggaagtacaccttactcctctcagtggtgaggggtcaaaccactccttcccagcgatggggccagcagcctggctatttttaggcaccggggagggatgctggatttggagctggggggaaggggtcaccctgcattgggctccagtgctccgggtgccatgcctgctcccccaccactgccaccagcgctgcgggacaccaggggctggggctgaagagcagcctcgagccgggctgtccaggacacggtcgcccttcttcctcgtgtccgttggctcagcacaacctatgcttagccagcccactatggctgcgtgcgtggcaggacccgggccaccatggctgcgtgcatggtagggcacatgattattttagcctctggtatcactaaccatccctaaagtctccaatggtctgttcctgtctttccctctggttcacttgtggggtcatgttgtcttctgttctttgttatttatttttttcttgagacggagtcttgctctgtcgcccaggctggagtgcgttggtgcgatctcggctcactgcaacctctgcctcccaggttcatgcgattcccctgcctcagcctcccaagtagctgggattatgggcacctgccaccatacccagctaatttttctgtgtgtgtgtgtgttttgttttttggtttttttttttttttttttgagatggaatctcaattgctcaggctgcagtgcaatggcgcaatcttggctcactgcaacctccacctcctgggttcaagaaattctcctgcctcagcctcgcaagtagctgggattacaggcccctaccaccacaaagggctaatggttgtatttttagtagagacagggtttcaccatgttggccaggctggtctcgaactcctgacctcaggcaatccgcccacctcggcctcccaaagtgctgggattgtaggcatgagccaccatgcctggcctaatttttctgtttttagtagagacaggacttcaccatgttggccaggctggtctcaaattcctgacctcaagtgatgtgcccacctcggctgcccaaagtgctgggattacaggcatgagcttctgtgcccggcctgaactgttaagtgtttgtgaagaattatttgggggcctatttgagagctgttatatggatcatcctcctggagagggttcttaagcctctgagaccgggtttggggctgaggctttctgacccacacaagtcatgctgacccctgaagggccgcaggccagatcttgccaggtgagcactttccccgctcacattcaggatagggcgagggggttggtaccgattcaccctcagggcctagatttgggggcttcagcttgctgcagataggtgctcccttcactctcacctgaggctgggctggagcctggtgtctgccccaccctgctggtcagccccctaggacctgagccccgtaagcctggactggccacgccctggggcagcagcactgggtgcttggcgctcacgaccttcctgggcccctgggtccctcacttctcccttgtttctaccttcctggcttgtcagattcccacagctcttaaggagaaattcagtatttactgcagcatgtgttttcagtgtgatggttcatctaggtaccctagcctgtcattgctggagttggaaatctctgttgtctgctgttgttttgtgaaacaagcgcgtgaggttataagtttccctcaacgtaccacactaaccacatttccctaagttttgatgtgtagtgttttcactgccattcagttcaaaatattttctcatttcaagtatgatgtcttctttgatccatgtgtatttttaagttgctaagtgtacttactttggccgggcatggtggcttacgcatgtaatcccaacactttaggaaactgcgggggggaaggatcacttgaacgcaggaggctgaggctgcacgtcacagggagagacgggccgcggtgatgtacgagcttcctgttgataggcagttaagttggttcgggataacgtggcctgcctggcacgggtattcccagagtcacagatgctcacccgtgccagcgttggctgcttgggacatggggacagcgagggcccccccccacatgtgagctgctggtagctgggctgagcccaggtcccatccgtgtgtggggcgtgagtgtgcggtgccatcgggtctgcacgggcctcgcctcgtcccggacgctccaggcttcctgtggcacgggtgccgagagggaccagcctgggcctgctgaaccgagggggtggtctagggcagaggctcctgctctgacaaaagggaaggtgaaaggcaggagcaccagggaggggcagcacgaggactggtcgtggggtggcagccgaatgggtggtgtggctcgagggcagtgggccaaggcctgggcagtctcaggcccagggatggaagccccatgctggcacaggttggagtccagggtgcccaagacacgatggcccgtgtgctccacctcctcacatcttcaacagctttgcagagatgaccatgtcaggctttggctgctggtcacaactccaggggaaggtcaggcttcctgttcagtttgtccagtcacagctctggccttgagtggctgtcctgggccaagggcagctgccctgagatcagagcaaccccgccttggccagcatcgtcccttcccacggctcctccaccacacaactgggacccatgggtgccagatacagcgtgggccatcacagcctccccgggcactctgctggaggcctgggtgtacctgagccccataccacgcccacccgtggtgccctggctaggtcttactctgacccctgcttcctggctttccacagccgtgggaccagccccagccccacatccacacttcgtgtggccatttcctcaggacatggcctggccactccattgtgccgagaggatgtggcccaaggcacacccagacacactgggtctaggctccaaacccgcccccacagccccacgatcccatcagcagcagaggggctgaccctttctcccactttgtgaacaggaagcctgagctccagcaagctagggtcacggggaggggtggggctgtgccacccaggttgcgtgtctgagctggtgcatgtggccagccccggaggtggacatctcaactctgccaccctaagggcccgacacggctgcagccctggatcagggtgcaggccatgccttgccccaacttgcagctgaaagtcttgtccatggaccctccaggctgagagcccagccctgccctgtctgtcagaatgctccccagggcctttgcgtcgaagcgggagatctctgtcctggccccagctggctccggttgaccctgcatcctgccaccttgacgccaagcgtcctcagcagtcacatgcagagcgggggcgccaggagggccagtgctctgagcctgcccactgagggccccgctgagcagcagtggcagcttcctgccatacccggggcaggccaaccacagactctctgggtccttggtgggctcctgggggaggggcgggggaaggacgggcaggaagatgaaagaaagggacgaatacggatggagccatgcagagcagagagccccatctccaggagcaaggcaggggccgcccggtgcttcctcctgcacaggggttgagggcatgcaggacgcccaccacctatgcacatagccccgtcaccttacccacccccaagccacagcaccgcaccgacgcaggaggaagccccaaccccgtgccaccaaggaaggcagctctgctcgccccaaccccgagcacccccaggtgaagacatcagacccatgtccaggagcagaaaccaggagagagaaaataggcattgtcagaaacagaacagtcacaatggctctttacatgactggctgtaataggtcccaagaagtggagcggtcaggtggctgggagagtccaggctccgtccccaggtgcagggtggcggtggcccaggcaggacagccgggaggcggggaggggattccgggagtgtctgagccgccagtctcaggagcgggcatggtgccgacagtgggagcgggcactgggtcctggctctgcagggccacaacacccaggtgaagggatgagcattttgccaggacacggctgtcatccatgcagtcacccccagggtgagagggcggtttgcttcccaggcatcacaaaccatgctcccaaactcctgggcagcagcctctgcctgagaagccacagcagctaccagagctgcctgatgcctggaagcagggcctcagtcagcctggggtccagagcaactctttcaggccgaagggtcagccccggacacctgtgaggcaggaggcctggccgtgggccctgaaaacttcctgtttgcaccatggcccggagaccggccatgcctgctcctgcgactgggagctccctggggaccagaccacgcccaacagaaggggctggcctgccgggggccacggggccgcacagcgcaccgggtttgcggtcagctcctggcgctgtgacctcactgcggggctgccttcctctgctccagctccgacagctgctcctcccgggcccgtgcgtgccgcacccccactctgtgcgccgtctcggtggccatgatgtcgatctgggcgtagagggaggcgccagcccctgaaagaattctgtagtgagcggcagcctgcgccccgagccacccagccctgtgaccctgccctccacaccagtcccccagccaggccctcggaagcatctgagtggggacaccctcaggggatgtggcctggccagggatggagttggggacatttgcctcctggggggaggctgtaggaaaagctccctggccaagggctgctgggtggggctgggggctcagggccctgaggctgtggtcccagcccccaattgtcagtgcctccacgcagggcggggacccacctcggacaccctcgctggcctcctggagctccaggcccatgtagtgcagctgctttctggaggatgggctgacggggatgttcacgtaagtgggcgactcgccgcgcggcctctctggtcctgggctgtccacagccacgggtcctggggatcctgtggggggagcggctgtgaagccccggtggggaccgagaggggcacagatctcaaagattgtgcagtaaagagctgcccaccctgcctagcccctcctccccactccgcctctcctgcaccttggaagttcccgctccatgttcctgaccgtccatctttggcccagcgctgccccatcctgaggccccccccacactgtccactcctggtccaagtacccacagagcagaaggaagcgctgtcccctccactgtgccgcctcccctgcaggaattgccgacccccccatgggccccccaaggcccactcttctgtccctgcgcccctcgccccgcaccttcccaactctctccaccaaccgcccctccttggctgtcccagcaccttctctacctaaccctcccgggccagcacagccctgctttgtcctggcccccagcacctccccctcactgtcctccggggtcacccccacctgctgcaggctccagggaccccctcctctcctgcacacaggcccacgctccctctgcatcccctccaggacacccaggtgccccacaccctctcccccctcataggagctactcccttcccccgacccccttcctaatagctgatggttctgtctgcacaccccattggtgctggggagggcagagcaggagcaggataggaggggaccccacaggcccggctgggtgggacttgaggcaggctcccaccttagggggttggacgcacaccggcccctcctctgcaggcctgagggctccgcaccgtgggcacccaggttctacaggaaggaccccgttctccagtgcctcctcccattcttgtcatcaggacctcgtgagggaacgcacagccacgtgaggcaggggaggtgacagcaagtccccccccattccctgagccactggctgggagacacagacaagccccacccacagtgacctccccacccccagcacactccgagccctcagaattcaggtgggggctgggatccagcgggtgacagccctgcagggtcggcctccctgaaacacctgcctgtccaggggaggggcctgactcaaggctgggcctccctgccccagggatgcatcctcagcagaccaggttctcctgtggccacccgctgcccggcacctgccgcagacatccactctgcctggctcctctcacccttgtccccgtcactccctgcagcagggctaggggtgaggaactttcacttgcttgctcccagtggggaaactgaggccagggagacctgactcgctgattctgcaggcagcagctgggacagagcgagatggagcccaggtcgacgagggttcgctcacctgattccatgaactaaagcaaccaacacaattctgccccaaccctgcctggccctgaggccctggggagacccccctcctgcaaatgtgtggtcctagagggctggtcccctcggaatgccaggaccccttcatcgagatgagccacagaacatagcggccaagttctggtgcccaggcaggcacctgggccagcagggacagggccagcagggccagctgcctagaggagggggcatggctgaggggctaggccaagagggggtggtgggagaggcaggtggggtgagggcctggggagagctgagggagcgccggggcctggcgtctggaaagggggccttgaagccaaggggcagggccggggcttgcccacggtggggctggacacccccctgcagcctggtacctcgttttaggattgcatccgttcttccaagtttgctccataggttgggcggtgaggggtgagggtggaagcaggaaggagcatgaggcctgactgcagggaaaggggacgaatgttcccaacaccacccggagtcacacgggggctgtaagcagcgctgggccagcagtgtgtccgtatctgtatctcccccaaggccactggctccagggccctcagtgctcctcctcccgtcccctccttgggacttggattttgcttcggcttctgtgagcatcgcttccagtacctcggatactctttcagtgaagcagcaaccgggaatcggctggcccttctgcactctcctcccagaccccgccctgggctggcagcccgacgctaccacttgggcctggctcatctctgtcccatgacagaccccaggcgcccctcctgagcccccggcctctgtggaaaagattcacatcctccagcagatactgggcctgtccccttgatccccacacctgtgtcccagggcacccctgtctgggtaaaagacatctgaagggtacgggtggcctcggggaggcaacagcaggctgcccaggaggacccttggggcagggctggccccaccacctctggtctggtggctgcctcaacacactggactgcagggatcggtgtccagcccagggccaaggcagactggtgggggctttcccaagctgcccctgcctgcctgtggcccgcccccatccctgactgtcccctccaggcctgcctgggcgaccatccccaccctgggtgtcctctccaggcctgcctggaccccgcccccctgtaggtgccacctgcctgggaagaagggattgaggaatccaaggtttagcccgcagtggctcctactccacaaggaaacaggcacagaactggccctgatgccacccatctaccccaggccagccgtcctcatctccagcctctcagccctgcccaaccttcagcagggctctgtccccagtgactgccaggcttctctagggagaccctggggatccgtaccttcccactgcctccctgcctggccctccctcccaacctggccccaaaactgcacctgccagggcaccaatgccctgcccttcgccgagtcgctcaccaccagcccagcctccacaggcccccaccgctgtctgaggacacagcccctcctccctgagctggggctcctggaccccaaccctgactgccttcctgccatgccccctcccaggaacaggtccacactcagggcttggggacccgtggaccccagtctgtgtctcccaaccttcagtccatcctccagcagcctgccctctacccactgccctgctgtccacacctgggctgggactcacccccactgcccactgccacccagcaaccactgtcaactgtcacccaacacccactgccacccaacatccactgtcagccaacaaccactttcaccacattgcccacattccctgctggcagtgggccccccaccctcccccctccccatctagtcaaactctggctgccatctgcgcccacccagactcccgccttcctgtccccgagctctgggggactggctccaggtgcctacctgaatgtgctgtcgcaggtcctggggctgaggctgccgctccctagaccaaagagaacctgggtcagtgcatccttcagtcttcccctcatcctgtgcccggggggccaccgagaacaaggacactaccccccaagagtgacacaggctgggggacctgggtcacctgcagggagtccagcccgccatacctgatgccttctctccagggccctttgccccacagcccccagatctccgggccacccactgccttgaccacccagcctggtggtagcccccataaccacccatgggggagctggaggcctcggcatctggggagggggcggttcccagccctgaggcccagtccagccccactattttgctattagagctttatcggaggagtaccacgcccatgcaaggtagtgtctgggctccgacctcagagctgagcggctgctccgagggtgcctgtgatttcctttcccgtccttgagggtgtgggccctgctctctgcagctggtggggaaggctccgcaggggggtgcccctggaaaatgccccactgggaggccccagatgagatgagcaaagttccctgacactgcaggcgaccttctcctgggcctctgaagtgggccgtgcctaacggggtgccccaagtccctggaggagcctatggtggggtctgaagggcgcttgcgggagggacagcggcccacggctgagcagaggcttcctgcccacctccagcccagatgagcagaagcggggccagcccaagacaatgtcccacatgggttccggcagccggcagctagaaagaaggcgcagcaccctcctgttctgaggggcctcgtgggtgggggctgggaggccggaaatgggggctcagcacctagcactggtgcaggccagactcaagggcagacagtcacagggctgggaccctcacacgaggccccctgagcaaactgagctggtctagactttgagaacctttgacaacaggccgacaccccctgagctcatcacatacacaggctcctgagagggcccctccccagctgctcccgggggcgggcaggcgggtaggtgtggatggtgcagagcccgaaccagcgaaggtccaccctgtcccctgcctggccaggcccaggtgctccaggggcgtcaagaaaacagaaccagtgtctgtcccatctggttgcccctggcctgaggaggagcccccagcctgttggccacccacctgggaactgggtactgaggctggagaccctgggctgccgtagcagcggttgggccggaaccttcagacgcccggagcgaggcccactcacgagcatcgtgaggagaggcagatgtcccggccgcatccccacagggaaaggctgtccaggggcccagccccgccaggcaagaggccccatgactccaggccaccgctgtggggtgcttcagtctggtcccatcagagggaccttgcccccactagccttgggcaggcgacccgtgggaacacagagggctgagcgtggatgatgaagactagcgggaagggcctggctccccagcaaaggagccacagcctcactcgtcctgcaacaagactggcgcggccacctccggaggtgacagcagcaggggtaatggtgacgggcagctattgagcgcctgaagagtgacctcatcagaccctcagtgcagcccagtgaggcggggtctgtcatcccgtttgcaagaggaaactgaggctcagagaggggcggggcttgtagggtcacccagccagcaggtagtggatgtggcccaaactcagtccccaaagcccacgcttgctcaccaggcactgctgcagaagccctccagaactccccgctcagagtcagtccctgacagggtggcaggcaaatccacaggcaggcacccacaacagggtggcgggtgagggggcaggcaggcaccacacagatgtgcaggggtgactgagacaagcctggaactcggccccatgtagggagacaggcagggcaggggccctggctcagagccaagccccctcctggaggtccgccctcaccgggacctgaggagccccatgcctgagggactactgcagaccccactgtggtctccaggacacacccaggaatgtgccacacgtgcacacaccacacatgcacatccagccgggggctgcccggagctgcctctccgcacaccacagcattcaggcccaaggctcacaagacagatgaggcctctcgcactctctgagataaaggccagggaagccgggcccggggacttcacatccaggcagaggccccacgtggagggtgggcgaggaggcggagagggctgggcaacggactaggacaaggtggtaagaaaagaacattttatttccagtctattacaaacagtgtctgggtttagaaacagccgacagtgaagggacaaagaggtgttcacagggagctgctgggctgtggtcagggcaggctccaggctgtgcaagaggaagccacccagggcaggggacaatgggcccaacacagccccacctccgacgcaggggctgaggcctgggccaggggaaacacaggccaagccagcctttggccctgcgaggaggttcagacaagagccagcggagctcccaccaggggcccgaggcacggcgcctctcccagtggggtcagcaggcgaggctgctctgaggacaccacctgctcccggaaccttcccacaagggcttcactggggaacagtggggcccagaacccagagaccccgcaagccacacagcctcctgagcttcagtttcctcccatagatggggatgaggcccagcgcacacggagcccggggggctgggctggtggagcccaggtggccggagcctctgtggtagcttgatgcttaacaggtggtgtgactgccccagagaggtgatggggagaaccggccacccccgaggtgaggcccaaggaggacaaggccagcagggctccagcccttggaccccatgcaaggcacgagccaacagaggtgcagcactcacctgatcctcaggggtgggggacacggagtgaaggcagctgggcattggggctctggtgaccccgacctgccagacaaaaaacccctgccttccagaactcacctccccaagtcagccccttcctccggtggcagccacagggcgcgccctccagctcccctctccgggagacccccggtccctcccacagaacacagagcaccagtctgcaaggaggctggcgccacttcctctgccatctgggggcaaattcagcccctttgcagccgcggggcgggatctgcggctctcaaggaggggggtttaccttgagtcctccacagactggacatgccgaaaagaaagccgggggtggccccgcgtgggggccgcctgcttcccagggctcgccaggggcagggccaggcagtgtggcctcgctgccctggggggcctccatcaccaggccccgccgtctcgtgcccagccagccagagggacacccggcggacgtctggccgcctgagtccctggccgcactgttgccggggctgccctgtgagggggggctgtggtctctaggagccaggcaaaggctgcgtggtgtgtcatagtgggcccgcagggaggtgggcacctggtactcgactgtcccgggcaggcaggtgcacaggctgggctcgggggcccccgctgctggcaggctgagcagtgagcccagttcatctgtggcccgccacacgtccaggctgctgcccgcgtaggacgagaggctgctggagtaagaggagtggctgccagtggcgatgccgctgtccgaggagctctggcggccaacctcctgcagctgccgcggacgcagcggcttggggggtggccttgaggcacccaccatggcttccccggcggcctgggcagctgctggtctaggcccctcctgtgacgtgctggctgacgacgaggattgctctggccatgcggtgagccggctgctggcgctgacgtccaagtgactggcctctgaggatgagctggacaggctgcggtcatcccctgagacagagcaggaagccaaggcagttgtgggggtacaggggtctgggcaggacgtggctgatgcctggtggacccccacaggccagcactctctggtctcgccccaccccttccagcccccaagccccggggcctacagcagaaacctggcttcaccaacaacaacccctctacccctcatccactcctgttctttgtccgttcctgtccttctgccacctgttctcctacggcctgcgcccctccctctcagcacccctgccactaccttggtccccgcctcctccccttccctagagctccccaccctccctgcctaacaccccacgctccatacccagccatcccgactaccttccagggccacctggggcagcttgccctccgcaccatcacggccccaggctggtctggacgtcccttccccaagaacttcccaggccctgccagcctggacacgaggcaccagctgtgcccacacacctcgactcgccccctgccctcaccatgctggcgtccttgcctcactcccagtctccctccctgcgggggatgagaagcacacccaatgcagatcccaggctgcctcccgcctgccaggccaggcccctcccgtgctcttgggaaagccactttcatctctgctgcgtctctaagctgcctgctctgccttccagggctcccaaatggaaagcagctgtgagtcacccccaggaaggcaaaagcttattgcaaacctgagtcccctcctcctggggcagggcaggaggggagatgaccactgtctgcttggtgccctctgggggacaagcagtgatcagagggcactggccggaccagcacggctcctgcacttggccgtgggaacacaggtcacccatgcagccacccttcggggagcacagcggcccctcctgctctgccagccccttccaccaccacctctccccacaatggcaacagagccagagccaccggcagctgaggaggtgcctctgctcctgggcagccagctcacctgccttagagccttttgtctgggcacagaaggtaaaaccaacatgcagggccttggtctcccccagccacaagctggtgggcaggaaaggattcaaaggctctcagggcagaaccacctttcccgtcagcacctcagaccagagtttagtaaatgtggaaccataagtgaaggaaggaatgaatgaataggtgggagaaggaagaaatgaatgaacagacagaaggaaggaataagcggagggacaaggaaagaatgaatgagtgagagagaaattgagtagggagagaagaaagaaatgaatgagcaggggaagaaggaaaagaagctggggtgagcaggaaggaatgaacgagcagggggagcagaggaaggaaggaacaagcaggcgaagaaggaaggaatgaatgagcagggggagaaggcaggaatgaatgagcgggggggcggaggaaggaatgaatgaaggaatgaatgagcaaggggagaaggaatgaaagagcagcgggagaaggaaggaatgagcaggggggaaggaatgagcaggggggaaggaatgaatgagcaggaggaagaaggaaggaaggaatggggggaagggagaaacgaatgaacgagcagggggagaggcaaggaattaatgagcaggagtggggagaaggaaggaatgagccgggggaaaagaaaggaaggaatgggggggaaggaaggaatgaatgagcaggaagaagaaggaaggaatgaatgagcaggagggaaatgaagaaatgagcagggggagaaggaatgaatgagcaggggaagaaggaaggaatgaatgagcagaggagagaaggaaggaattaatgagcaggagggtaatgaaggaatgaaatgagtgggggggaaggaaggaatgaatggggggaaggcaggaataaatgagcgggggggcagaggaaggaatgaatgagccgggggagaaggaaagaaggaatgagcaggaggaagaaggaaggaaggaatgagtggggggaaatgaaggaatgcatgagggggcccggaaggaaggaatgcggggaagggaggaatgaatgagcaggagggaaatgaacgagcaggcggagagggaaggaatgaacgagcaggggggagcagaggaaggaatgaatgagcagggagagaagaaatgaaggaatgagcagagagagaaggaaaaaacgaatgagggggtgaagaaaggaatgaatgggggtgaagaaaggaatgaatgagggggtgaagaaaggaatggggggaggaaggaattaatgagtaggaggaagaaggaaggaatgaatgagcaggaggagaaggaaggaatgagcggggtggtggggaaggaaggatgaatgagtagcgggcgggcggggagttgggggaagaatgaatgagcaggagacagaaggaatgaatgaatgagcagagggagcctgcagcccccacacatgcatggatgcctcctgagctctcctgctgggagcttagccgaggtcccacagcccatgtcagcccccggccctaccttcactgcccggcctgcccgcatgtgagaggaggctcagccgcttctccagctgtagggtttccagggcttcctgggccacacgctcctccacagtcgagggtcccgggggacttgggtctgtggcagagagaagactcggtggaggaggtggccaccaccgcccaccctcgcccgcaggcaccaggcccagcctgactcagtggttatccccctctgtggagtggcagtcccctgggagtccccgctcctcccgatgcctcatcccagaggctggccctcaaacgcagacacccacaccacccctatccaggccaccatgcgcccagctgggtccctgtgcccgtggatggccctgccacctgcccactcaccaggaccccacgccggccagacccctccttcctcatcttcctcaccaccgagtttttcaattttctgttccaaaaaatgaccagcccctcccccatccccagggccggcctcgctgcaagaggggctgcctgcccctcattcacggtgcccatttctcacaggctcccctccacctggggaaatgcccgcccaccttgcagtgtccccaccgttccctggggtctcggatggagactcatactgtgcccaaggctcagagcatggtggtctgcggaccctcggccccacctagcccctcccctcagggctgcatccagggagcaccagcctcgccttctctattcatcgtccatgtgtcctctgcgactgagtggcaggaaacctccccttcctgcccaggcagggtgggacctctcactggcccctcagcaccgctgctgcgagcctcagcatcactgccctggtccccaagcccccgcccatgctgggatgtcccaggcactaagtgatgtgaacactgggccaagtggctaccttgctccaaacagcagggctcaagaccctgccccttccacatccacagcacccacggccacagccatcccaaagagtttccctggcagggaagccacagccacacccgcaagagcaaaccgaccccgtcctgctccaagtggcctcctctgggcctccagaacacacctcctgacacccaccttgggggcacctgcaggactgagccgaaacaggtccaaggacctgctctccccaaagtccaggagcagtggcagcatgaaaagtttacaccaaattctgcagcgcacagaggaccagaaggtacagtccccagcctgggacacctagatcagagcctcagcggacagaacccagcctggcggaggctggagccagacgtcccgaccccatggtcagcgctccggagaaacaaacagagaaagcaatggtgtccctgtccaggttcacatctaggctgaagaggccctgtccctgataggacactgtcctctgctgatgccttcagcccacacaggtgcccagctggggcccttgctcactacaggagaccccatcaggacctcagaacagggccctccccacgggcaggtgagagctcacagcaccgggcccaggaacacaagaagggcctggaggagcctcccccacctctgggtatggccaccccaaggcactgccccggtcagcctggggccctgccagcccaagaccctgtggccctgtctgtagcattgccggggacagggatgggggtggccaagcctctctcctgtcccctccctgcctgtgcctgggagggtggaaggcgatggcagccaaggctgtgccagctcaggcatcagtccctcccgacacggcctgctggtggccatggagcccacaggccacacggcttagcagctcctggcactttcacagacacattcagccacgtgggcaggacagcaggcaccagtcctggctccttggtgcactgagggtccaggctgaagacaagcacagtgacaggacagcacaactgcccctcagccctgggacattccgaccagggccaccctcaaagccaatgccccacatgtgggacggagagtggtccctcggtgacaccagggtcaggatgcaggacacaacctcccaccatttcccgtccagtaactggtgggccagcaagacacggatcgactcccagctccaccacacgccccctgagcctctcaccctcgtctgcaaaatggggtgcagcaacggtgcacccccgtggagccaggccaagaaggtaacatgcacgccatactcggagcatggtggaccccagacctctgagcccttccctcctgctcctggtgggtctggctgcctctgggactcggtgtccacatgcggaagaccaaggggctggacttcctgcatctcttggcccctccagtgggtcacagcgggctcagcacaggaggacggcagaaagcccagagcttgaggatgccgcccgcagggctctattgtgggagtcctgtgatcacggggctccagtgtgctgccagcacaggcagacgaacccatcagcccagaccctccagtaagtccagcctgcgggggctgggcccacggcttctctggtggggtgctgcccagcatagtgtcccagctcaacccacctccgggtggcctgaggcccccacacacctgcagaggcacagcttgggggcacagctgcaggccgaggccctgacaacagagctttctgagagctcccagctgactctgacaaagatgtcctgtggagtggggtctgggacttctggtcagcccaaccccctccagctgtcagcaatggccccgcctggggctggcccacgtgctgcctgcggtggagcctgtcccatctagtggctgtcccaggcaaaccctccctggcatcctctgcccagtactgcttccctgcttccctctgctccccgggaactgcctgaggggagcaggagagagcagggagccctgctcagcctcctgctgcccctgcccggccctgtccccgccctgcactctgcacaccctcgccttgcacagccaaacacaccgaccacatcatccacgctgaccacaccatccacacctgcctgcagccgctaggcaggaagacacctgcaggggtgcatccactaggcaggaagacacctgcaggggtgcatccactaggcaggaagacacctacaggggtgcagctgcaccatccagcatggcagggcagcggggagggcgctggccataggtgccacctccccactcccagggctgcccccaacgggactttgctggtgtgggcagggggcattgggggctgtggccaggagaagggaggcccaggtcccaccccacatgctgctcgcctctgccctcccagtcacccttccccgccacaccacggcgggggtgccagtgccaggaggcgccacatgtgagcttgctgctcacccgccacatggcctaggccttggcctcacttggacgttgggtcaagcgctgccctcgtggagcaagaggagcatttgagagagcccatggaggcacctggcccagcacccgccccgacctggggagccccaccgtgcccaggcaccagagcccctctggggtccagcaacatccctggccaaggactcctgcagagagtgccgcagccacagccaaggaagtgtgggtgagacaagacgagaccccctcagcccaacgtgtcctgagaccccacagccaggggacctcccgaggtggccttgggcctaaacaccgggctcaggcagagccagtcccgaccccagctgcagagtcagaccagctgcccccgggccaccgagctcgggcaaggccttccctgctcctgggcgtggaagatggtggtggtgggtcagagggtctcttactgcacagtggcagctgtggctgactgtcccagccagaaagctctagggccaagcgttccaacagctcggacccccgagggagagcacctgcaggtacgagcccagcccccgctgctctgaatccctcagcagggcttgcagaagcccaggctgcaatcctggcctggaaaggttctggttccttagctgggggtggggaggctggccatctaactggggctgacaaatcactgtggccccccgccccgggacgtcgcacagcctgccgagcgcaccctccccggccggccaggctcccacacgcacctggtagaaccggccgcagcccaaaggggcccttggtgggggagatgcctcggacgatgcagtcgaacaggaagctgatctgctccccctcggccgaggacaggaagaagacgccagcccctgcagaggaaggacagagacaggtcagtctggcccgagggcgggctggggaccctgaagaggaggaacacaggaaaccgcagcaaactccaccaagagccgacaatgacaccctgcctggccccacgaagtcagatgcccagagccgacaccccgcctggccccgtgaatccgggtgcccagagccgacaccccacctggctctgtgaagctgggtccccagagcctctggactccccagggaccccgccgcacccttcaaacttgggcgctggggtgagtgctgccccgcccatcctaggtcctgcagccgacagggcatggggaggagggagggggtgccctgccctggacagatgggtgcccccgcccacatacctgccttccgggcttgcttggggggatggggggatgtggctgctctgccacccagcaggcacttgatcagtccctcctctgccccaaggtcccagcgaccctgcccccacagccgtcttgagggcaaatgaagcagccaggagaccccagagacatcaagtagggtcccctcagggctccaaggccacaggagaagggagctgtgccacctggagctggggtcacatcccaggaaggctgccatgtgaccacacttccttcccccgggctgttgggagggctgcattcagatgtttgtaaaaggtgtggcacggcacctgcccacacatgctgcagccgtcactgctggccagcaccgcgtcctccccacctcctcggtcatctttcaggggaagctggagctgccagtgtgtgggtgctgccctgaggccgtgtgcagcatcctggggccagcatccacccctgcacccccacagcagcaggagggcccccagggaccagcccagcgtcactggcagagcgatgcagccgccacccgtggagaagccccagctgcgagtcacgggggcgctgccctcccggccaggggtgaatgaagccctggcggccgcgtgaatgggccactgggctggctgcacccggctggacactccggctggcgtcacctcacaggaatcccgcccgctccggggcctctgcccattgcccaaagaaaggtacgcaggagggaaggcgccggggtgggcaggagttggggggaagggaaatctcggcattagaacccccgctgcctgctgcccagtcatgctctgccttcacggaacacaggctgtagattccagggacacggaactcaggccagccccgacacgtggcgacgctgccggccccttggcagccaccccgggcacacgagggcgagcggcaccttgtgctgtggatgcttccttccacgtagtgtccccaaaccgggtcatgggacagcgccattcctactttagcaaaaaggacactgaggcccagagaaggcacgccacctgtccaccatcacacagccacgaggtggactcaagtccaagtcccctggccccctgtgcaccttctggcccgatagagcttccagtcctactgtgggtgaggggtgctcctgatcagaattggaggtgggcatggaggggaggccaatgcccgctgcgatgccatccaggaggatgccccgagaggctcatgagggccgtgatggggtggggcccccaagctgggtagggtgggcagaagagagcctgcaccaggccctgggggcaggcaaggagaaggccgtcatgctgtctgctggctggctcactcagtgccaggcagtcgctccctgtccccgtggtccacccctccctgtgaagggctcagccggcacagccccagctctcacgaaaggccaggctctctaatcctgagcttacagacagctggcagtggccacgggacaatgagtcccccgactataaaaaaccacattacggaaggagtggagccggccccgcattccatgcggcgtctgcggagcgtcactcaccccgaagacacggtcaaccgggcaaggcctggagcacagcccaccgccagcctcgggctcccacgtgcccacgcgacaccctcgccagccacccccatcatccatgccagcagagctgacatcagtggccctggaggaagatgcccatctccaatgctggtctgccaaggtcttgggccatggcctcccaggacaccgcacgactaggctctcgctgggcctccctgggttcatgctccacccccgctcccacccagccccccccggtcttgggaatgctcaaagctccctctgcacaccaggtctgcctgccatctccactcaggaggctgccgtccccaccctccacacccctacatctccactcaggaggctgccgtccccaccctccacacccctacatctccactcaggaggctgccgtccccaccctccacacccctacatctccactcaggaggctgccgtccccaccctccacacccctacatctccactcaggaggctgccacccccaccctccacacccctggccacctagaacaccccagacctttccagactcaggccacataacgacacctttcatgatgcttttcttggcctctggcccccttcagtcccctgaccccgacagcccctctgtggtgctctcacggacgcctcctctggggttcagccccacctgctgccgtcccggctgccaggctgagcaccttgccggcagggagcacaagccgtctgtggtctcagtgtccacccaagcgcccataaccaggagacccccagtgctcggccttgggtggaaagacataggtgagaggctgctgaccgcccccctgccccttccccaagacagggtgcgcatgtttcctgtttgcctgtgtgtttggggaaaggggggagaacagggcctgccccattttgctatatcacacaggtgtgactgcagcaaagccggccactctgtttcccctatccctgccctcagaggccgctccttctccagaggctggtccactccctccctggaatcgaagccagccagtgatggctctggcataaagtggcatgagggatgctctcccagccctgccccaagaccgtcagaggcctggcagcttctgctctcttggaacctattgagaagcccaaggtgtcctatcggagggtgaggttcctggagggaaactgaggcaacccagccaacagccggcacagtgctttcctgggcctttgggccccaccatagccaaatgccactgcccgagggaccccaggcagcacctcatggggcagagatgagctgtcctcactgagccccgtccagatccctggcccacagaattgccagccagggaacagccgccagccgctaggtgtggcagggtaaataggagttagctcagctgttagagggtaagcggtggaggggggtgaaaagggcacgtcagacatctttgagcacaaacgggtgtcccaaagggctgtataggagccctgttgtgggggataggaggcgtgagggtaagaggaaagagcatggaagacgcagagaagcaggacagagtcagcagaacacaagcagaaggccaggagctgcggggctcagggcggcgccaactctggacagaggctggggttgatgagcggcaggcaaacctcacccacgttacagacgcacctgcttcatgagaaacacgtctccagtgaaaaagctgttgcactaactccaggactcaccggcttgagaaagaaaatgctcctccacgcagacatttaatgagccaattagatctaagatggtttccatctgaatattcttgagtgccctcgtggctgccccttgatgtcagaatcttaagtgctcataatcccagctcctcagagaacaaacatcggggtgaccagggtgtcctggatggctcatgccaggtaggcatgggcaggactgagaagtcttgataacatgaccctcagccctctccatcccccaaggtggcagcttcttgtacacttgggagtggccccacctagtgggtctcgggtggaggaaggcctggagcctggcagtgggtgttggctcccacccctcctctgccctcctgaagcagccccagtccaggggcaccactctagaaggcccccccttcccgggccggccctcctccccttgtccatcaccaccttgttaacattcctgcaatccacagggttcccatcccccaaccaggcagctgctgcctggggcagcctcgccctccatcttctggacctcaatcagaaccttctctggcccctgccagcctcttcctccaagctcatctgcaccccggggtcaacattagcatataaaacactccccatgctcaagcaccttcaatggctccctgctgctccgagacaatggtgcaaacaaacactggtccaattagccagctctctacaacccagccctgtctcctcctcctcctccaccctcacgcctcctatcccccccaacagggctcctacacagcccttcgggacacccattcgtgctcaaagatgtctgaagtgcccttttcacccccctccaccccttaccctctgacagctgagctaactcctattcaccctgcagaagtcccctgaggctcgcccctccagagagcttccccgcagtgcccccagcctggggtctgtgcccctcctggctcccctcgcaccctctgaggactgaaaatgcctcactcagtctcacgcagcctctgaggccggaccgtctgatccctaggcccagcgcccggcaatgagaaactgctgaaggcgctccctgctgcctgacagaggccagggttccagccagctctgtccaggctgcccccgcaggctgcagtggccaaaggtggccggcagggggctctccagagctgggcagatgccgcgttcatgtagcaagagcctcctagttcaggttttcattctttactcttctttttttgagacagagcctggctctgttgccttggctggactgcaatggcgggatctcagctcactgcaacctccaactcccaggttcaagtgattttcccacctcagcctctggagtagctgggattacaggcacctgctaccacacctgcctaatttttgtatttttagtagagatggggtttcaccatgttgaccaggctgatctcgaactcctgacctcaggtgatcctcccacctccgcctcccaaagtgctgggattacagacatgagccactgtgcctggccacattcttaatcatttttaaaagtcaaaatgagtttcaaatgctccgggcggcccccagaggctgggcaaagaggcagatatggtccttggactggacccagctggagagagcaggtaaggggggaaaaagggggcacctccaaaagcttccattcaccctcaaggcccagctcaaacgtccccctgcgcctccaaagccctcccttcctaggctctgggtgggctcaccctctctggggcccaccaccgtctgtgctgcaagctgagcctgtcccagggcgagtggccctctctgcatcactctccaccacgcacagtccatccccgaaggcggggcccagtcacttgcccgtgtgtgaggctggagcctgcagacctgagctgtccacagaccgtcgcctgccatgtgccaagtgcgctcgggccaagctccaggagtccacactacaggcccgtgaccaacagagacggggaattgggccacactggggacccgggggttgctgtcaccaagccattttttgtaccattctgaacaggcagctgtccacatagagacctctgccccccatgcaccaagaccagccaggcctgtctccacccgacccccaccagggcccccgtgatgcacagccacgcccagtgtctcaggatgagtgaggcgcagccatcgccttgggccagggtcaccctctctgctctctgcagagctggctgtggcggggccaagtgaggcggttctggggatcgggggccaggctaggacctgtccctggggaaggagggaatgtggatttcctacacccaagaacttccagggccttcccacgactccagcccagctgtgacctccagactgaatgtgacgacacccacagacttattgggattcagattctggatatttctccgtcccagtggccccagttgtcggccaaatggtggcccacaaaatgtgttcacataccagggcctgtgaacaggagcctctgcggatggaattgatggtctcgggatggggtcaccctgggtcatccaggtgggccctaagtccacagactgcaagagactgaagaggaggctcacgcaggagccagcaggcgcagggactggagtggcacagccacgagccgaggccgccggggccaccagcggctggaaggggcaggaaggaccttcccatgggtcctccccaagagcttttggaaaaagccaaccctgaggaccccttgatttggggtttctggcctccatgctgcataaggaacccgttctggacacttggccctctcttgggggtcatctgctacagaagccccaggaagctgatgccgctgcccctggaccacccgagttgccggctccctcccgcaggaggccccaggctgcccacacgtgccgcagactccccgtccctccagccagacggcctgcactcagtgctgcgttgagaacaccaccgcttggccgagtctaagacccagcctaaaccacccagggtggtggccacgcctgtctccaggaggatacagcccagcagggcctgctggggacagggatgggtggctcggccaagccttccagcctggcctccagaacccacctaccctacggggtgtgcagccgtcggtgaccgaattcccagagcccttcctctctcaggccagggtaccaccggggacgagaacattcagcactgagctgcaaaggcgggttctgtggggccagcccccgtttgcgggttctgtggggccagcccagtctgcaggtttgtgggttctgtggggccagcccggtttgcaggttttcaggttctgtggggccagcctggtttgcaggtttgcgggtggggctgctctaacagcttgccccggagaggcagcagcaagacagacggccccacaagagtgcccccagcttttgagcagcccaggaaaacggcacagtagcctcgccctggggagaagcacagccccaggtgtgggattgtttaccagcggaaaaggggccacccacacctcggcagggatgtgaacctccacggcctcagaggaaaaacatccagtgtccccattccattatggcccagacaaaataagcaggtctccaaggaaacgggtcctcctgctgtgccccggcttagagggtgagcacgcggcgccaccccggccggctgcctgcccgtgccaaggaattccacagacagaaaggaaggtatgggtccccctcctccaggcacccccaaacctagcacacaacagacaggacaggctgcctgtgtcaggacaactacagcctgcagctctggcttcccacacgacaaaggacagggacgctgggcccacccactgtgcccagccaccgccaacccactccccagtggctcccgaagccccagtactgaacctctggcctgccgcagggagggcctgggggcagatgggaccccgacaggtgtcctagctctcccgggaaccaccccccaccccaccccccgcaccagctcacagctggcataggcagcggccctgcccatccatactggctctccaatcccagaggggccaaggccctttggactctggctatggcccctgccagccccaggggccgagactccgggccagctctgccgcacgtgcctcctgcagctggctgtgtacgcccccagtccgtggagcctgagcctcactgccctgttcccctttcaagggtcagatgtcgtctcctcaaaggccccaacagggctggctcctgccacaagacctactgggtttgctcccagcgcccagcgcagaaggtggcagaacgtggcacccagatgggcttgcgcccgtgccccagctggcctttgcaggagatggtcccaggcggccagtgtggcccgtgtccttgcctgcgtttcctccacccagacacatccaggctccaccagagcccccaccagtgtgagccaagtgcagtccctcagtcctctcagccccaaaccaggcccacaggaggtccctctgcccgccttcagcccggccaatgagcagctgcccctccagagagaagagaggaggcgtcacaccctccgcggggactgcaggtccacagggcaacctggcgcatctgcacccaacatgggagaaagtggagggggttgctggaacaacctgctcctgcacagccccggcgggcacctcagactctctgggcagggctgggtgccttcctgctccgatttccctcactcccctggctgagtgaggacagctctcaggccttcacaggcccagaggactcaggccatccccacccacggcctggccacctcactggggacattagggcagctctgggcggcccacaggcggggtggctggcatgtccaccaggaattcttggtccaagaatatgtttctgcggtgcttatgcgggagctcacactccccactgctaaatgcgtttgttctttgttttttcctttccatgaaatctggatatgagcggctctgaggctctgtggcctcaggcccctcctcgcatccctgaactctctccctccagtgaggaagagcagaggtagccgaggcccctcctcgacactccacactgaggttcctgcgggcagaggaccttggacatcgagcgtggggagactccgtccacctgccggcgcattctggaaatgccagcaggccagcctgcaagtggggtcggccggcccgaagccagcagttctcaggggaagtggggggtgctgctgctgcccagtgaccccacacatccgtacttacagtacccacacctggtcccgccttcaaagatgaatccgcttggcacggccccgtagcgccggaggtcagacagcttccactgccccgtgacagccggggggatgtccctggccaagacgaggacatcattgcagaggtgcagggtagccgggccgctctccaacttggtgcctggagccactgtcacatggaacctatgcactgcgggcaggcggggcaagagggcatcacgggcgggcagggtgagaggacatcacgggcgggtggggtgagagggcatcacgggcgggtggggtgagagggcatcacgggcaggcggggcgagagggcatcatgggcgggtgaggtgagagggcatcgagggtgggcggggcgagagggcatcacggtcaggcggggcgagagggcatcatgagagaaggcaacaggggccacgtggagggcatcatgggcaggcggggtgagagggcatcatgggcaggcggggtgagagggcatcatgggcaggcggggtgagagggcatcatgggcaggcggggtgagagggcatcatgagaggagacaacaggggccactgtggacaggtggggtgagagggcatctcgggaggaggcagcaggggcaggggccaggctggggcaggtgggggcagccgcccaggtgtcagccggggaggcagcgacggcaggatgagcaaatggcactcctcacagccacgagggggcctgggggctgcacttctctccttgccatcctcccaggaactatctttgttcaggggcaaggaagtcccagagggcctgacctcggacctccacctccctcccctcccaccacggaggtgctagggaggacagggcagctgagtgccctggctgggctcccacccccggcacctctccaggaaggctctctctccacagctgtgtggctccatcacagaaggggaaaccgaggctcagggatcccccagcctccagttcgggtgtggagagtctggagtctgtatcgaggccccagcctggccacgggaacctcagggcaccaccggccctctctccatccaggtggccattcacccaaaccctgagcacccccatggtcctgtgcactggctctgcccaggcccctgcccctgaaagcctcagagaggacagtggtcctgaatgctgtccccacctcccctgtcttcccaggtcagcacaccaggcagacagcagcctccccaccaggggccccacctgctccatctccaacccccagagccaaagggacccctgttcccatcccacctcccccttctctgcctcctctacctgctccaagctgtggcctcaggcgcatccttgtcaggccacgttctatcaagatgaagctgcctgggcggtgcccagcggcctctgtgccatggccctgcgccagcggatgaaggaagcagacccatgccgctgagccaggctggagggaacccccaacgggagaactttctggaaagatgcagttcttccctcctaatgtctccttcccctgcgccctcctgcagagccaaccgcacctcctcccactaagcccccagcttctctctccccactcaatggagcaggaggggctgctgccttggggacaagactgggggagcgggacactcacctccaaggccaaagaactcagccatcaagggccaggatattttaatcaatattttaaaaagtaaagttatgcagagtccatgctgatcaaaatagcaagtttttttgtgtttgtttttttgagacagggtctcactctgtcgcccaggctagagggcagtggcacaacctcaggtcaccgcaacctccacctcccagctcttttttttttgagatggagtcctactctgttgcccaggctggagtgcaatggcgcgatctcagctcattgcaacctctgcctcccaggttcaagcgattctcctgtctcagcctcctgagtagctgggattacatgtgcccaccaccacaccaggctaatttttccatttttagtagagatggggcttcgctatgttggccaggctggtctcgaagtcctgacctcaggtgatctgcccgccttggcctcccaaagcacaaggtttacaggcatgagccactgcacctggccatcatttttgtatttttagtagagacgaggtttcgccacgttgcccagggtggtctggtctctatctcctgggctcaggtgatccacccacctcagcctcccgaagtactggaattacaggtatgagccaccgtgcccagcctaaaatagcaagtttttaaagggagggcagctgtggctgctgggattattgggtgggtgccagggtaggaccaggactcaactcagtggacattctactgttttgctcattatggggttttggcactgattttggtttcttaggagatgcaggattatgcttgctctgccgctgagtgcccagggccccatcaccacccacctctgctcacagccccagggcagctcagcccccagaggcccccaggcacccattcgaagcccctgcagggctgggactgacgttccacctcttccagggccagttccacaggggagcactcccttcccctccctctcccctccctctattccctccctccctcccatcctgttttggggggaagctggggtgggaccgcccagcctggggctctccttcctagccaggctctgggctccactgtccagtgtaggaagcaaagggcagggctttgggaagccacgtccctccaaaggccaccagcttgggttaaaggctccagttgtaactaacggtcaggctagggagctctaaagacaccatagcccagcagactccccctcccaaaccctcgtgggcacccccaggctggagctcagtccaccctaaggcacccatgaatgtcccatcttcctgcacggttccctggagccgctcccacctctgcagcccacgttggtgaggggccccggcacacctgaacggggagcccccgcccggccccggcccccgtcactcaccctcgccgagcgcatagcggatccgggcatcccacgcacacatggcctcgtggctgtcaaagcccagcatgatggcctgggacaggcagacaatggccagcgtgtggaccaggccctcgtagggcaggccgggctccagcccgcagatgtcctctagcgtcaggctgctgcgctcccgcaggcccttgatacgctccgacttgtccttgtagaccagcatcagcaggcagtctgcaaggagcgtggccgtcagggacgccagccaacaccgcctgcccgcacccttggcgtccccggggaggccgtgacagtgcagagacccgggctggggtcatgacctcaagccagccactcagccatgccaaggcttcgactcccggcatacaaaatggggcgatcccctccccttgcaagacccacaggctgcaagagcggaaatgaactcagaatattcatgtctgtgcccagcccccgacgctggctcccatgactgggttctggaccttcactggcggatttgccctgtcccagtgccctggaatccccctgggccacactgagggctgcaggatctgtggtcacgggcttgggggcccatcgtggggcctgcccggtggctgtggcctcctgccctggttctgccagtccgctcctatcctgccgccctgccagccacacctgtgcccactccctgctgcctcgagacccaccgcccctcctggttcctttagttcccaggttgtggctgagcttcagccccagggggtaggggaggtcgatgggccttgggtcccatccccatccacccggccactgcccagcacagcaggccctagtctcttcctcggctgctggggacctgcctgcgttctgcctcccggaccctccagggcaactcgggtccccgtctccacccccaccttcccattttccaacgtcactgtcaccacaggcaaccggctggtgctgtctactccaccaggtgcagctcaaacctggcacagcacagtccctgtgtggccttgggcaaaccacctggcccggggacactcctgtgaatggcgggggcagcaggtctgcctgagagagcagagaggacggcgcaggaagactcccggccctcccggcatggctccaggcttgatgaccaggcctcctcccacctaggccccggcagctgggctccaggatacccggcttcggcgagggtgtaggttttgggacctcatacaaacaccccaaatccctgtgagcatgcaggaggggattggggagaatgtccccgaagaggattgcagaatgacgtgtcatctgaagctctgaaaagcaggtgctcactcttcacacaggccctgcaaagccacgtgagaaccaaaatcccaaatgaatttgacgcagacactcatttttgcaatggagtccagagcagacatggtgctcagcttccctccccagccgtgcccacctccccgggccacatggccacagcccgcagagccagggggtctgtgtgaccacaggggccagcggtcagcaagcttcctctgcaaggggccagagggcaagcatgcagctttcagggccacacaggctctgcggccactactcagcaccgccacccttgctgcgtgaaagcagcctcagaccctgtgtagacccttgggcgcagctgcatgccaggaagcttgattcacaaaagcaaggcgtggtgtgggcgcggcgacagtgcgttcacttcccattggaggatctgtccgcagcgtctgaaacgtttacagctagaaaaaagctaggcattcccaatttgagaaagaagccccctcattcccgcacctacagaactccgcctgcccagctgaggctttccagacaatctcctggccccctctggaaactccaaggcaggaagcaggacgcccggccccaagagagaaatcaaacacagcggcgtaatcggaattcgccgtaacagcaatgtccctcaaatgcgtcaccagagcacccaagaaatgacggtgtgtgggaacagcatgaacacgggtggctccgcgcaggacgggggccccagggccgcttgagccggaggacagcccgcagtctccaccgtctgcagttgaagtgtgttgtgagatcgctgcaggggcccgggccacctctgccttgggggaccctaaaaagctgagccacacccatgttgaaacttccactgaggataatcacgcaccatacagaccaccccttcactcccttcccctaaggggcaaggcccctgggaatccctgctctgacctcccagctgtatggccttgggatcttggcctcagtttcctcatctgtgacctggggacagtggcacccccacctgcagcaatgccgtaaggaccatctgcaggaaggtatggaggccctgtgtgcagtaagcactcaatacatgcttgcatattcaggtacacatctgtatgcgttaccagctataaggccagagcgtcttccctgcaatctggctgcccatgcacagagggaccaggtgacccatggctcaccctcagtgctcagcaaggggcacacactggccaaccatccaccaccttccacctcgagggcctcagcttcctcggagccttggtgggctgatcacccagaagtcaggcagggacctttcctcccctgtggctctgctctgtggtggtggcaccttggccacaccctggcagacagctccggcacctgataacaaccagttccttccattgcccccaaccagcacctcctttgttcaacaagttacattcccaataatacagtcaggactggggtcaggagcttgcctgtaaagagcccgacgtcacccttttggcttgattgagcttaaagtctcctttaccatacttagctggaaagcagccacagatgacacgtgtgggaatggctgcgagccaataaaactttatttacaaaaacaggttccggcaggatttggcccagagaccacagtgagccgactcctggccaagagttgaatttgccacgacggcttctcacaccttccacaagccagccggccccaccctagacctctacccctgcaaggctggtggtggggcgcatgctgaacccacgctcgaccctcagacctctttctgattcacggacgccacccctcggcctgtctgacttttctggactctgtctacaaatgcagactcacatcctgcaccttgggaacgcctgaaaatccaggagcacttacaggcaggggctgagcgtggcccccagcaagacgtgtccactcccgaccccggaacctgtatgtccttatttgggaacagggtttctgcatatgtaatcgagttcaggatcctggattgtctgaacgcagcagcaagtgtccttgtaagggggagaacaggaggcgcagacacagggaaggtcacctgaatggggacggaggcagggactggagcgctgaggccacagccaagggacacctgtgtctaacaggagctgggagaggcaggaggagcccctctgggaagcctggagggagcgtggccctaaaaacccctcgactgcagagctctaactcccaggactcagtgggtgaattctcattgtttgaaggcccagctgtggtgctttcttctgtcggccacaggaaactgacgaccacccaaaccgccgatttcattttcaaacatgaacagaagccgagaggtcagagctgggggcccgctcgtccctcctgcctggcagaagcttctccggcagctgacgcccaccccctcacgctcaggccgccctctcctcatcaccaacaataaatcgatcctgtttttaaagtgcatctctcggggagtgccagggggcaaagcgctgcaggaactggtaccagagagatggaagctccaggcccagggctgagaccaagccaggtcaaggccgggacaccagagccccaggacgcagcggctctccctgggacacagcacgtgtgccgggtagacacaggtatgggggactcaggagtggatggccaccggccagctccccgggcgccaggcccagagggccccagccacaccctcccaggaggcctgggcacctgggagtctctcacccagcggctgaggaagcaccatcggccctgctcacccaccctccggctgggggtctcttgcccggcggctgaggaaccaccatcagccctgcccacccaccctctggctgcgggcattggctgcaacctggccagggaaggcttttgcagaacttggagggttcccggggctctggcaggcagcactgggctgggtggagggcaccgggtcgtgatgctgaaaggagacaaacgaggaagaggcaccaggagaggccaaggcacagagaccatgtggaacaagcaggcacacacgcacactcacacagaggcacacacactcatacatgcacactcacacagacacacacacatacatgcacactcatacacagacacatacacgaatacacacaatgtgtgcacacatacatgcacgcacacacaggcacacacatgtacactcaggcacacacactaatgcacacacagacatgcacactcatacacatacacaggcacacacactcatacacgcacactcacacatgcatacacaggcacacgtacactcatacaggcaccacactgacacgtgcacaaaagcacggacactcatacacacacacatacacacacagacatgcacacatacacaggcacactcgcacacagaggcatgcacactcatacgcgcacacacatacacgcacacacacattccatgcatacacacacaggcacacacagacatacatgatcacaggcacacatacatgcacacacacacgcacacagacacatacacaggcagacatacaggcacgcacacatacacacacatacacagacatacatgcacacacaggcatgcacacaggcacacacactcatacatgcacacacacaggcatatacacacgcacacacaaaggcacgcacacaccaatacacgcacactcagacaagcacacacattcatacatgctcacacaggcacacacacatacactcacagtcacacacactcatacacgcacacacgcacatgcacactcatacatgtacacagaggcacacatacatgcacacacaggcacacactcgtacatgtacattcacacaggcacacacactgctgcatgcccatgcagacaccggcacacacttgcacacacagacacacgcacacagacaagcatttgagctcacacacactcgcacacacaggtattcacacgcatgtgcacacgtgcacacacactcccacaggtattcacatgcacgcggacacacacttgcacacatacacccccacacaggtattcacatgcacacacacacacttgtgcacacacacccccacacacaggtattcacatgcacacacacacttgcatacacacctgcacacacaggtattcacatgcacacacacgtggacacagtcatgcacttgcactcatgcttgtgcacacacagaagcgtgcactcatgcactcagtgctggggtctgaatctgaaattccagtgttgaaatcttcacccccaaggcgatgggttagtggtggggcctttgggatgcgatgaggtcatcagggtggagcctcaagaatgggaccagtacctgatgagggggccccagggcgcttcctccccctacaccatataaggacagagaaagcgccacctatgcagcaggacatggtcctcacgagacacccaggacgcggatcctcaccagacacccaggctgccttgatcttggacctccagcccccagaaccgtgagcagtgactggctgtcgtctgagccgcccaggctgtggcattcgctaagagccgcctgagctaagacagccacacaagcccacactcacacattcactcttacacactcacccaaatgctcacacttgctcacacgtgcacacgctcccacggtgtgtacaggtgcacatgtacatcctcacacacacacacgcacgtgcacacacgctccccctgcattcacctccacagccacagggaaacgaggaatccaggatgagccctgggacttgggttggggagggatgtctggggtgggggggggggggtcttccctggacacgtgaggctgagaagcccaccagacaccgggcggcgatgcacacaggcagttggacgcaggcttctggagatgtaaaaataactgtggagtcatgagcacacggaaggccttacagccagggcggagagccggggagggcggagggaagaaggaggagggggagaagccgcagggaagatggagcaagcaggcatggtggcccaggtaaggcaggggcatgtgtgggccggggacgcagtggggggggtccccgcccacactgaacacgatgggagtccgcagaagtggctgcgggacagcctttggaggtcacagtgaccttgaggctgtgcccttagcaacgcaggtggtagccgcctgaggggaccctgctggggtgcagcagcctggagccgcccccagaagctgggcaggagcaaggggggcggccatcgaccaggccggcctgctgatgcctcctcgggccaggccacagccaggacacacgagaccaagatccagtgcctagccccggacccattcacaatctggttcgggaaggaaacgcgtgagggtgcccctgcccggcacaggtgttggaggtgtggtgcaggtgggccccccagaccacagacatcaccaagggcagcccaggacgaggctccagatgccagggccaggccctcgcgcccacctctccattgccctcaagagccctgtgagtagacgaggacgcaggcggggaatgagccgtcccaggtcactgctcccacatgtggagctgagagctgaaccccagctctctgattccctgtcctgacgcgggggctgagggaaggtcgccctgttcttgatgtttctatggggagaggataactggccaccacccacgcccggtcttcagcccggagctgggatgtcagccccagtccgttggggcaggagccagacgcacaggaaatccaccaccaggaggctctgctcaggaagggccgacccagtgtccacccccagcccctcgttagcggaggcgctgtggagggcagggccccaggacagcactagccgtggggcagctccggggctcacggggcacctgccagggggctcccggctcctgcgccgtctccgtggggtccctcctgcaggccgggctcagtcccaccgagagcaaggataggggagactaagcaagggcccagccatcagcccgggggcaggcgcggaacttccagccagctgtggggggcaaggtttgggctggctggggggaactgggctctgcccagcagtccatgtcttgggccagatccctcgggtttctgagtttcagcttccccccaccatggtgactccaagaccctgccagctccaggactcgggccctcccggtggcttttctgagctggatgaagcccccaggggcagcccctgtgggaagcaggccccctcaagtgtctggcctggggccacactctccacaggatgtcaagaacactttcctcaccacccccagcccccgcacctgggaggaagaagagaggggctgggccaggcgccgctggcatgcagggccaccagcagtgagtcctgggccacaactggacacagaccaccctcctcccccggggccctgcccagagaggggacgcagacacgcattccgcagtgaggacgcggtggagacattgaggaacgtggtcccactgcagggcaccctgcagtcccacaccgaggcagacggcccgacgttcactggccatgccaggcgctgtggctgagcagccctttgataaaaggtgtttccctttcattcgctaaaccttgtcataacagaaagacgtgctcacgattgagaaaaacgcaaggaggagaaaggtgccagtggaaaaggtgcacatcggggcccttcccagaaggaaatcaccactggtaacaaaaagaaccctgcctgtcttacaaggaagcagacgggacccttcctctctccctcacaccaggagcgcagggtctgtgctgtctgctcctccagggctggggcctgctccctccacgccgggcccatccacaagggaggtggtctccagcgctgagcgggaaggcagctgggtgaaggcaaagggggcagcatctagggaggcttatgaggggccaggggaagaggcatcagggcctctgagcggagaggaggtgccaggctggcctggtcagggtggggaggtgggcgtgagaactccgctctgtcccatcccctcatctgaccgacctctgggcaaccccacagggtgtcagtttcaaccctgggctgctggagtgaccaacacagaaagcaggtgtccaaagcaatgggtcccaggccagtgagtcagtgggtgctagggacacctggcctcaaggcttggaatgaacatccacccagagggggcatggcaccttctactaccccacatcacctcccacgccagccccagaaggctgcagatctcaactgcgcaggatacgggataacccagcagacgctcgggagccaccatgttcacctacagactcacagattgtcccacctgggggacccattgcaaactcctgtcactgcactcaggcactcaccggccgggggagcacaccctcttgaggctggcaagccctgcctcctgggactgtctgatggccgaaagaaaatccctccaacagggacaaagacttctcccccgacactcctctttgggggctgctgagatttgtgccttcctgggatgcggcctctctggagggtctgcaccggctccagcccagcaccatccaccaagcatcacctgccccaccacggccccgacccagccacagctgactaaagcctgtcatccgccccagcctggcagggcctctcactctgcccagaccccatcccttcctataccaggtcccctgcagccccggaggacaaagacgccctcccaggctctgtcggtgcccccacagctccaggcaggaggtctgggcacggagggctgagtggagaagtgaccagcgtgcagtccaggccctgcaaggggaggcggaggcaggcaggaagtgctttcctccaggaccacctgaggccctgcagaggggacgcaggagggatccctgccccacaccctccctgggagtcacagacacccgtcctggagggtgctctggcagccccctggcgtacagccccccatgcacacaggccgagcatcccacccacccccggcctgccggctctgcgccctgtcctctggagcagctgcaggcccggctcagccctccctacaggcccagcgctgcaggcggcctgggctgccagacctgggggctccatgctgaccctccccaagctggggtgctggctcagggcggggactggggggggacccctgcctcctcccagaggactgttcccccagcaatgtggcagtcactctgccctgccctaccgcagcccagcctctcgtctgcctgggaggggtccagggtcagcgctaacccacgcagcacccctggaggctgggttcgggggccctgctctgagcgtttccacaagcacagctcaaccctcaggtatgtggggctttgcttctggggggccccttgctgctctgctggggggctcagggcctgcgtcccctccgcctacagggccaccaggcagcccctcgggcctcagtctgccctgctggaaagagggttcttccgtccagggcccccacctgcgctcccaggggcgccggggggtccgggtccgcacggggctctcgggtttcccggcggggtgacagcggcggcgattttgggcaagctggcattactgccccgggcctcggtaacccgtgtcgctacccccgcgccccccgtcccccgcccgccccgctcacctgccacgggcgacggacttccgcagcaccagccacctactcttccactgcggggacaggggggagcgtgagccgccgcccgcgcccgcgccccccccccccgcgcccccgacgcgccccgaccttcttgccgtcccgcagcttgacctggccctccaccagcgccgcctcggtcatcttctgtcatggttccgcgccgccgccgctccgccccggcgccccagcccagggtcactttcaaaatagctcgcagggccctgggctgggccaggagggcgggcccgcgggcagggcggcgacaccggcgactccagggccggcgcgggcggggctccttctcctgcgggcggctcccccacccccacgggcccctctggccccaccgtcccgcggcggccactggagccgcccgccctctggagcaagcgcaccatctgggctcagacgctcagaccagcgcctggcggggcgggggtcgggcggggacttctttttcaaaaagcagagacaaccacctagcagacatcggccccgctctgggcactgctcccaactttaaagttggtcttcaaacaatccggcttcccagactggcatctgcccctaccccaggggtcactagacacccggacaacagactggccacaggcagcccaggcctaggatgctctcacatccccaggcttcccccacactgaggtgacccctccccaggcaggcagtaggggtcggggagcccctggcagcctctgtctcttcctccatttctgttcccattaaaagcctgcagggaccccagtgcaggtgggcgggtccaggacccacagtgccgcctcagggccccaggtctccacctcttctgcccccatcccaggcaagagcaggccctggttaggccagccggctccgatgggcagaggagctgcctgctttgtaaaggacctgccagcagccctcccagctgggtggactttgcgcttctggactccccctccttgaccctgtggctccagtccagctgtccccaagctctggcctgggcattagatgtcacatccaggttcttctgcagagaggccatgtgctttgggggacctggcaggtccgtgccttgggtgtcagccccatccgagagacggcctccaccaccctggggttggggacacccagcagatacgggaacagcagtggggaggggcgatggcaccctagaagataagcacctggacaaacagcaaagctccgtccacatgccctaccctagaccccatcctcacggggctgacggttctcgggggagaagaaggaaggggtagacagtgtcccgttagggaggagacgtcttcatttcatcccatccagaccctaggctgggctctgtctgcctcgcactgaggagcaaatggaatcagggcagcgtgaggcctcacagccaggactgagccacatcggctgacctcagagcagggctcagaggcatcgggagccctgggcgcccctccccactgcccctgtgatccaagagacaggtctccggtgggccacaagggttggctttggtgcttcggtgatgtcttgtcagggcctcatgcaaggcgggggacaccaggcccaggaagcagaattttgcatcccccacccacccccgcagtcacctgtgcagccaccagccgccttccgcagaacagttgctgggtcacagagccccattcatgctccccacacatcccaggcccccaaggggctggcccaggacagccggtgcggaggcgggggccgttggggctgtagccacagacacatccgctgccctgggcgcctggcacttgcttatccctacagggagaggcagggccctgctgcattcctgagtgctggcccgggcccaggctcctgccatgcctggcagctgcacctgctcccacacagcctggaacacacaggatgccggagggtagacaactcccttccctgctccatgcggctccagggctgctgaaaggtggaggaagcttcctgcaggaggaggaggtggcctggctgccactcccagactggccgagagcgctgtgaccctgggcaagctcctgccccgctccgtgcctcagaagttatagccagaagtttccccagaagttatagccagggttgctggttgcaaatggagaaataggctggccactgagtaggaaggggttgattggaagcaaatcaggtgtccaagaaccaagaggaaggctggagagctggtaggcagtgaaaacagagccacatcctgaaagaggaggacaccacagctcagccccacagcacagctgggctccacacgaggggcagggtcaccaccttcaaaggagcccacagtctcaggtcacagcagcacccctgtctgaccacagagccctgctgcggctgccatgctgctgctggacactgtggccagggacactgccatctctgccagaccccatggtcgtggcacattgccacccgccagtggctctgtggccaagggacctgtccctgactagccacaccaccttcagccaccatgtgatcttactggtctcagcttcctcttctaccttgatactgtgatgagccccaatgagatggcgtccatgagcatctttcaaatncgatccagggttttccaaggtgattccaaggggatgatggggaccaggggtgggctgctttgtcttgcatctccaagtggcctggtgtgtgggagagaaacacgtcagctgagtgtggcaagcactgtaccctgtggtcacacccgtttgtgcatccacatttcccagtaccaccaccccgcccccatcaggtaaggctgtatgagtgagttctggccagtaaggcatgggtggaaggggtaaccaacacttctggcctgcccataggatgcctgatacagttcgactgtgtccccacccaaatctcatcttgaattgtattaataatattagctcccgtaatcctcatgtgttgtgggagggaccaagtgggaggaaatttaatcatgggggtggggttttcctgtgctgttctcatgagagtgaataagtctcatgagatctcatggttttatgaagggcagttccctgcacatgctctttgcctgccgccatgtaagaggtgcctttgctcctccttcaccttcaccatttccctttgccttcagcaagcacctcagcagttcatgtttttttttttcctggtggagtgacccaaaccttcattcctgaagtgtctgggggatttgtagtcctgcctggattgggctgttgtagtttcccattgaccttaatcacagggcatggtaatattaatagacgccctaatggatcttttgtaattctatgcatactcttacttacctcctttgtggagctgtagactgatttcatctcgagagtctgggtcaatcactccagccaacactgtaactccttcttagcctgttgacttaaaggtaggaggagcccagagtgtccaggtggcaatcttaacttctagcttaatggaacagttgtgtctcctggtggcagcgttcctccctctggaactaagacctctaggccagcagaacataatgtcgtgggaacaggaagcaaacattttgctagtggatcactaggggtgatggcgagtggtgccacttccacttgagtgccttgattcctggacccgtgcatcctggctaagggagaaacaatatcatatcttggatgctgattcagagcatacatggccttctggagaacttggtcccagccctgcaaagtattgtcacctagttggtgttgtaattgtgacttcagaaggccattccaccgttctaccaatccagctgcttcaggatgatggggaacgtggtaagatcagtgaattccatgagcatgagcccactgccacacttctttagctgtaaagtgagtgccttgctcagaggcaatgctgtgtggaacaccctgatggtggatgaggcattccgtgagtccatggatggcagtcttggcagaagcactgcgtgcaagataggcaaacccacatcaggagtaagtgtctattccggtgaggacaaacctctgccctttccaggatggaagaggtccaatataatcaacctgccaccggggagctggctgatcaccctgaggaatggtgccatattgaggctcagtgttagtctctgctgctgccaaattgggcactcagcagtggctgtagacaggccagccttggctagtggagggctacgttgctgaatctccatgtgtaatctccatccctgccaccatggccactttgttcatgggcccactgggcgatgacaggggtggctggggaaagaagctgagtggtgtccacagaacaggtcatcctacccacttgattattaaaatcctcctctgctgagttcacccattggtgagcactcacaggggacacaaatatcttccgtttttgaccactcggagaggtccatccacatacctcttccccaaatgtctttgtcaccaattttccaatcatgcttcttccaagtccctgaccatccagccaaaccattgtctacagcccatgaatcagtacataatcacacacctggccatttctcctcccatgcaaagtgcacaaccaggtgcaccgctccaagttctgcccactgggaagacttcccttcactgctgtccttcaggcatgtcctaaaaaggggctgtagtgccgcagctgaccactttcgggtggtgcctgcatatcgtgcagaagcatctgtgagccaggtcctagtcttctcttcctctgtcaaatgattgttgcaggccgaaagagtgagggtcacgatcaactcagtataccaccagaggctatacgagtaaacagcaaactgttctcataaaagcaggttgttggtgaactgacaaaccacatatgctgcccagaaggactgctgagagcagtcacgacccacgcacaagtgtttcttgtgattaggtaactatgaagcctgttagcaataatgtgaacctgagatcaattaaggagctgaccaatcattacctcctgctccctgatctttctacccaacatgaagggctatagaagctcagggtggctgcccttgctcactagaaactgggagccctcttcttccccgtgctcttcctttaaaatagtttcttgttttttgttttcatttctacattcatcctccttcgttcagtcccgtagtaaccatggcaaaccgcggcaaatgatcacagggaactccccatgaggccattggtgcaggctgggggagaggaggcagggtggcaggagtggagaccatgggcatttgagccacttcctcatgtaaaacttacttgtgccttcaggatctgcttgagcccagtcacatatataccacttctctttgatgacggaatgctgctgtgcatgacccactttatggctagacgggttggaaagcacccgttcatgacgggcagttcaggttgcatggtgacttgatgacccatagtcaaatgttcagtttccaccaaagcccagtaacaggccaagagctgtctttcaaaaggagagtagttatctgcggaagatggcagggccttgccccaaaatctgagaggtctgtgctgtgattcacctatgggggcctgccagagactccaaacagcatccctatgtgccactgacacctcaagcaccattggatctcttgggtcatatggcccaagtggcagagcagcttgcacagcagcctggacctgttgcagagccttctcctgttctggaccccacccaaagctggcagcctttcaggtcactcggtaaatgtaccagagtaacacacccaaatgaggactgtgttacctccaaaatccatataggcccactaagcattgtgcctctttcttggttgtaagagggtccaaatgcagcaacttatccttcaccttaggaatatctcgacaggccccaaaccactggacccctagaaatgttgttgatgtagaaggtccctgaattttagtcggatttatttcccatcctctggcacacaaacgtctcaccaataagtccagtgtgtttgctacttcttgctcactgaatccagtcactgtaatgtcatcaatgtaatgaaccagtgtgatatcttgcagaagcgaaaagcgatcaaggtctctccgaataagattatgacacaaagccggagagttgatatacccctgagggaggacagtaaaggtatattgctgcctttgccagctgaaggcaaattgcttctggtgggccttatggacaggaatggagaaaaaggcatttgccaagacaatggctgcataccaggtaccaggagatgtgttaatttgctcaagcaatgaaaccacatctggtacagcagctgcaactggagtgaccacttgcttaagcttacggtaatccactgtcattccccaagatccatctgtcttctgcacaggccaaatgggagagttgagtggggatgtggtgggaatcaccacccctgcgtctttcaagtccttgatggtggcactaatctctgcagaccctccagggatgtgatattgtttttgatttactctttttgtaggtagaggcagctctaatggcttccatttggccttccccaccataataaccctcactctacctgtcagggagctaatgtgggggttctgcctgctgctaagtatgtctataccaattacgcattctggcactggggaaatgaccacaggatgagcccggggacccactggacccactgaaagtcagacctgagctaaaactccattaattacctgacctccataagcgcctactttaactggaggaccacaatgacgttttgggtctcctggaatcaatgtcatcttagagccagtgtccagtagtccccaaaatgtctgatcatttccctttccccaacatagttaccctggtataaggctggaggtctccttggggaaggatgggagaaagattaacagcataggccgggtgcggtggctcacgcctgtaatcccagcactttgggaggccgaggtgggtggatcatgaggtcaggagatcgagaccatccagactaacaaggtgaaaccccatctctactaaaaatagaaaaaattagctgggtgtggtggcaggcgcctgtaatcccagctacttgggaggttgaggcaggagaatggcgtgaacccgggaggcggagcttgcagtgagccgagattgcaccactgcactccagcctaggtgacagagcaagactctgtctcaaaaaaaaaaaaaaagaaagaaagaaagattaacagcataaattgtcagtagtgtagtggagtccttcctcaaggggacccagcctccccttcattcaaggggttctgggtctgtaaactgtctcaagtctggaaattgattgaggggctgtgattctctgtttttataattcatattagtcttttgtccattcgccctagaagttttctgcttatataaattaagcaggattgcagtaggcttcctgtcaatttcactttttaggaacactgtgattaattagccaatgccagagctctacacaagtcagactattctgattgccactttgcctctgctgtccattatggtagctgtgcccaccttgcctttgatggttgagtgccgccacttggcccctgccacctcaggatccagttattcccatcatcccattaaatcatatttaaattttgtagttgagtgactgtggttcccactgttagatctgacatacagagaagagcaattacagggcccttcaaagacgcaggtgctgccctcaaaaatctatttcgcaaggcattggtcaagggtatatcttctggaccctcccagctgggatgagtaggtctaaagtgactaatccactccaccacctcaatctccctaagcctttggatcccttcctctacattaagccaagggagatcaggcatttccaacttgctcacagtgggccatcttttaatccatatttcagccaaccaagcaaataaactattagaacctttttgaactcctgagctgtgacattaaatgcagagtccctgcttagtgggcccaaatcaataaatccagcccgatccaactctatgttccttccaccattatcccacacccttaatatccattcccatgcctgttctccagatttctgtttatatcaattagagaattcaaatgcttattttcaagtgtagcacacctccttatgggtcacactctcaacctcacctctaggcgcccactgggactttagtctagttataggttgagaaacaaacaggggtgttagggttggctcctcaggagaatcaacattatcttgtctggcaactgcctcatgggaggccatcactgttgcctcaggcagtgcaggatttatctcctcagacaaaggtggaaaggctgatggcagcatgggttagggagggaatgttgccactactggggatggggaagctcttccttctggtgaaaaatgttcatcagagtttacaaactcagtgtccccagcttcatcagggtcctcccacacatccccattccaagttgcagggtcctattcttttccaatcagtgccctcactttaacagtagacacctggcgaggctgtgcacgtacctttcattgcaggtcagtcactcgcatggtaagagcttgtgtctgtttttccacgatttcagctctttctctaaaggagataagactctcaatgagggcaatcttagaagatttgaggctcagtatctgcttctgaagctgagagttagaatccctgagttcatcattttctttcatcactttgtccaccgaactttaggagcaaccaaccagcttcattagctctttggttctccacatgtggtcaaaggtattatgtatagagtcactaaactccctgcctctcatgagcagtgaatcaagagtgtcaaatgcatttaatttgcatagctctctaaatagttcatgccaaggactatcggtgttctccatgccattagaagtagagtccttagaatttttgggtctaatcatattaagcaggcaactccagaaatcccaaaaccaacaaaagaagtccatccttaatattctattcttctagaaccactcctggtaccaaaatctgtattagggctctctagagggacagaactaataagatagatagacatatataaaggggagtttatgaagtattaactcacgtgattgcaaggtcccgcaataggctatctgcaagctgaggagcaaagaaagccagtctgagtccaaaaactgaagaacttgaagtccaatgtacaagggcagaaagcagccagcacaggagaaagatgtaggctgggaggctaggccagtctagtcttttcgtttttgtgtctgcttatattctagccacactggcagctgattagatggtacccacccagataaagggtggatatgccttccccagccaaatgactcaaatgttaatctcttctggccacactctaacagacataccaaggatcaatactttgtatgcttcaatccaatcaagttgacactcagtattaaacatcacagtggaacttcccgagagtgggtcttcctctccccagtccactgactcaattgttaatctcttctggcaacacccagaaacacccagatacactcagaaacaataatttatatccttcgacccagtcaagttgacacttcatattaaccatcacaaccaggaacaactttgtgtcaatgaatataaaaaattagacagatgaattttttttttctgtgagacagagtcttgctttgtcacccagcctggaatgcagtgacaggatctcagcccactgcaatctccacctcccaggttcaagcaattctcttgcctcagcctcctgagtagctgggattacagacacctgccaccacacccagctaatttttgtatttttagtagagatggggtttcaccatgttggccaggctggtctcaaactcctaaccttgtgatccacccgcctcggcctcccaaagtgctggcattacaggcataagccaccacacctgggtgacagataaatttataaaagcataacttcctgtaactgactcaagaagaaataaaactagtcccataactattaaagacattgaatcagtagttaaatacaatcctgtaaagaaaacaccaagacaggtaattttatgggtgaattccatttaactttcaaaggatagatccttccaactatatacagaattttccagtgaattttgataaaagaagaacttattttatgaggctgggatagccttgataacagtcattcagagaatataggaaaggaaaatcataggccaatctcataaacatacatgcaaaatcctaaataaaatataaattttaaaaagtttttaaaaaccaatacagcatgtatcagtcagggtcccaataggcgggcacacacagtggaacagttcaaggagggtttttatatacaaagttgtggtcaaaatgtggacaatcacagtcagaaactccagagcccagggctggttaaggtggaggggccacaccagttctagaatgctggcaatggcaggagtggaccccggagcctcagaaggagaaagtcttttacatcttgagagcagcgctgaccttcagtcccaggatgcagccaacctgagggtatttgtttgctacggggaccataataaactgccacagattgggtgccttcgacaagagaagcttatcaccttgcagttctggaagccagaagtccaaaacccagggggcagcaggcttggctcccttggagtccagcagggggcacctgctctaggcctctggccctggtttgtggacggccatcttctctccaggtgtctcccatcgccctcctactgtacatgtctgcgtcctgtaaaaagaagccattcaaaaccaaagttgttggaactttaaattattttgcatcttcaaggaacatgattataggacctgagttgcgtatgacggtcagctgtagcttaggcagctgtaacctttgttcctctgattatagattagctttttctttacctacattgttctgtaaaatgttataaaagactacaggacaccagggaagaccccttccctcttcatgttgatcttcactgtagatttgctcccctctgacttctcttacacagagacctcactggccaccacgttgtctaagacagaacgttcaataggctctttcaaattggaaaaggaaaagaaaacaagctgtgattaatcaaattgctgtgactcataaaccagccttgcatgggaagcactgtaaccctgttcaatttgtttattttctgcctgtataagcaagaccttcactttttggctttggggtactggctctaatcctctggagtctgtgtgtcctgagtggctattttcagcttcgtgcctgcatatgctcttttaaactggattctgatccttttgattatttcaggtggatagtccaaattttctcttctcattaggacaccagtcatattgagttagtgcccatcctaataacctaatttgaacttgattgcctttttaaacattctatctccaaatacagtcacatgctgggctattaggggttaggacttcaacatatgaattaattaatttattaaaacaggatcctgctctgtacccaggctggagtgcagtggcgtgatcatggctcactgcaacctccacctcctggtggaggtgatccttccccttcagcctcctgagtagctgagactacaggtgcatgccaccatgcccggctaatttttttgtagagactgggtttgatcctgttgcccaggctggtcttgaattcccacctgggcctcccaaagtgctgggatgacaggtgtgagccactgcgcccagtcatcatatgaattctagaaggacataattccacctgaaacactgaggtgactgaccccaaagaaagggagccaggaaaatacatgcccagtctctctcccctgcctctgatctcccaatagcccaacaagaaacaagagagtgcacagcccattgcagaccagagaggccagcctcccgcggcagagcacgacgggaacaagcagggcacaagtgggaggggcaaagggaagaccccagctcacacttcagctcaataccgtccactcgaggaatacaaggccaacctgagttagaaaacctatcatgtgccgggcgcagtgactcacgcctgtaatcccagcactttgggtggccgagttgggcggatcatttgaagtcaggagttcaagaccagcctgggcaacgtggtgaaaccccatctctactaaaaatacaaaaattagccgggcgtggtggcaggcacctgtaatcccagctactcgggaggatgaggcagaagaatcacttgagcctgggaggcagaggttgtggtaagccaagatcgcgccactgcactccaggctgggtggcagagtgagaccctgtctcagaaagaaagaaaaaaaatgaagaaaagaaagaaagagagagagagagagaaagaagaaagaaagaagaagaaaaaagaaaaaagagagaaaaagagagagagaaagaagaagaaaggaaggaagaaaaggaaggaaagaaggaagaagggagggaggaaggaaggaagaagggagggagggagggagggaggaaggaaacctatcatggaagtcatcatgttagtgaagccaaagggaaaatgtgtacatttatctcaacagaggctgaggaagcatgtgaaaatgctcaccgctcatggcggaagggtcagggacggctcacatcggatgtgggtgaagtggggctgaagccatgaggttcagagccccagaaccagctgctggaggcccccacactcaggaggaagagcggctccactctcaggatcctggggcacaggtgccagactcagtcccccagccactgcccaggctgcaccaacactgtggcaggggcaggggtcttcagtggcgagttcgttccgtgagctcgaaggctctgaggcccatgcacagcagcaggggccgtggggagaagggcctggccatgtctctcttccctctttgctcagaacccggctttgcttggggcggtaactgtgtggccccaatgccccatttcctgccctcccagcctccgtacagcctggggcggcgccaatctgctggggaaggggctcccgacgaaagggaacagctgtaactgcaaaccactgcctccccgagaccaggacgccaggaaggaggtggggcgcaggagagaaggtcctgggtgcctcgaagcagggaggaggcctgacccccaccagccacactcccgccctctctgccctctggccccacctccccctgtctcctgtcctccctggctggagggagggtacggcctctgcctgcccagcagtgaccctctaactgggccccatctagcacatgggcccctccctccctcagcccccacagaggcagcctgtggcctcctccctcccgggaagtgcagcccaggctcaggcaggcgggctgccatctggaagaccaacgacggcctgcgggtgttcccgtggggccgctctttcttcttcaggttcaatactccgtgcaccacgcggatcggacccctccacgcctgggggcctggacttggtttccacttcctgccctgggacaacccaggtgctgagccccggcctggggctggcctgggagggggctggactctgctggggcctggagaggcccagacctcatcccctgacaactctctgggccgtggggccagaccccgctgtggggccacaggctccgtctccactgaggactgtgtgcgctccagaacggcagcctgaggcctgctgcgcatagacctgggccccagtcatggcctggaggggaaggcggggccgcaggcaggggccaggcagcgtgggccgggttcttggaaatatctttattgtcagcaaggcagggaatggtgggaaccagggtgtcccgctggagggtcaggagggagccacaagccgcctgggaggccgtatccggtcgttgatccagtccacatagttggccacgcgggtgtagacccccggcttgtggagccgcccgcagccgtcaccccagctgatgatgccgtagaggtaagccacgccgttcttctcgcaggccaggggcccccctgagtccccctgggcagagacgttggtcagagccacccttcccaggggcctggttcagggacccccctctcccccaagtggcagcttggggacagaggacaaaggcatttctgagcaagggagctgatccactctcctgaacctcatgaaaaggtgtctcattccctgggggcagcactggctgggccagggcatccaaccacgttattccccttcctgaagccacggtccccctctccccaccagcatgaaccctgtgtggaccacacagccaccctgtgtcccagcacctcctgaaatgacttcttcactccctggaaaactcctacgcatcactcaggaccagtgcaaacactccctcctccaggaaaccatcctgacttcccttatcgaggtccagtgacaagccctacccactctaccactcctgggctttgtggccttggaagagtgaattgactgcctggggctcagtctccccagctataaaatggggcataagagagccgtcgcatgccagggttgccgtgccgcctgagcacacaggcctgcagagcccaggacgtggttgggctgttgggcttattgaaggttgaagaacttattgaaggttgaagagctggcttgagagaactcggggcaaaggggcctttggtgcctagtgtcacacggaaagcactgccttgggctggacagccaggaactgtccgggctctgtgggaccccaggcccctctcagagcctgggtctccccttctgtgtgaggaggatgcccttccggcagggctctgggtggccctggggtgctggccaccgacagtaagtgtgctccctgcccaggggtccctggctggccctgccaggttggggtgccgccaggctctgggctccccaggggcaagcatctcggagactcaggaccagctgagcccccaccagtcgggtcctggtggggcgggcaccagctcacctggcaggcgtcggacttgcagtcgaagtagccggcacagagcatgttggggctgatgtcggcgccgtagacctcagggctgctgcacttgtggtcggcgaccagggggaccagggcctcccgcagggagctggagtagccgctcacgtctgtgggacacaatgccctcagcgtgacacccacactgtggctggccactgtccaccctggcggggcgctgggcgcccccctcccaactcactctcatccaagtggccccagcccgcaatctggcacttgtgtcctgcggggaaggtgctgccgggctcgggcaggcagatgggctgcacgaactgcgagcgtgtggcacagcggtcccctttcttcttcagccggatcaggactgatcagaagagtggccagggtcagcctgtggtgtgcgggctgaacgggaggctgtcggggcccgtggtggagggagggtagccagtggggtccacagggcagcctgggagatccagaagggagcggtgccctgtcctccctgccctgcccccagcttcccccgcaccacatgtctgcccagctcctgcccctgtctgggcctggcctggggagcacagggcccacctgcccagagtgcagccacgacacgccggagctcaccgaggtcgtggtcgctggggttgaacaccgagtacagggtgtacgggatgtacttctcgatgccgaaggtctgcgtcacgtccgtcgtgcggttgaagaagtgctggcccagcaccacggagacgctgtccctgggggggctgtgcaaggggggctggaggctgcatggaccagccctcccccagccaccgggctcacctctccccaccccctgtcaggcccacggaggccaatggtgtgggaccctggtcccggggaggggtctgagcaggtgcctgggtgtgggctgttgatactggggagacagggaccaccaagcaggggctattgccagtcacccccagatccaggcatgggagctgaagtgcggtgccatccctcctgacaacactggtcacaagccctggggggagtctcaggccaagcccaggcaggatcggctgcaaggccgacccgagtgggtggagacctggcctgctcaggccctgccccagcttccatccacattgtggggtccccagatgcagccctcactcctgctgggcacagagcctgggcccctgagcctggctcccatctgctgtgtggaggtcgctccaccctgcctcggcctcctgccctgggctccatgtggggaaccccatttctccacactgaggaaggctctggccccatttgcaggcccaggagccgccggctgcaggttctgcagggccacgcaggaccccaccctgggagctgtggtcctcgaaaggccgccagaccctcggctggccggacccctgcccctaatcactggggtgcccatcgaaggtggaagggcgtctggcccaggctgctccgtctcagggtctccccactcgaggcccgcctcccagagtgtgggcctgggtggctgtgcgcccccactgaggggagccggctgagtgggctgggcctcagtttccctggctgtgcttgggctcctagggctctgacgcattgtcactgcgctccctggctccctactgagagccaggactctgggaggggcggggcctgcggggaggacaggacctggcccactgcactctccgcaggcgctgggtcctctgtggaaatgccactgacccctggcctccctcaatagggacagggtttctggagtgtccatgcatgcccagctcaggactgagccccaagacccagaggggtcagagagggttaccggggaccccgggaaggggtcagcagaggcaccgggatggggtccgcaagcgggtggggacaggcgcatagtgacgctggatggtgtgtggggcctcagggcaggtgactggggcccagaggaggtgcacctgtgggagaagcagtgggcggccgacaccacccagcaggtgtggaccaggctcccggcgcagaagctgtccccgatgtagatggcggccagccaggggtgcgagccgggcagcgaggaggagccgccgatgatacgtggccgcaggaacgtcctcttcttgtgcctcctgccgcaggcctggcgccccggggaggctggctcaggcagggtcgccaggagatccggtgacagttggactctggtgagggattctgggagcaaaggtcaccgggtcacacccctggggttcacagggccagcccccttccacacacaggccctacccggcaggaggcgctgcagagggccatggccggaccccctgtccacgctgctcaggccctggcgcccactcacctctgccctcagtttccaaatctgtagaatggggtttgatgcccgatcccgaggctctgtgagggccagaggggctggacacacggaggcctttgtggccccctcagcagcccggaaccccacagccagccccagcacagtcagagacccccacatgagagccccgggctggccccgccggggtcctagggagccggggggcctctccccagggcaggaagcaggtggcctctggggggcctgcacgctgccctccctgcacctccctgaaaggcttctgcggccatcctgggcatggtccaggctgggcaggtgccaccccgaggccgtcgcctggtgaccagccccctgcagcgggctgcttccccactgtgaccccagtaccgacccactgcgtgaccttggaccagcctgatcccgtgagctccagtttccccatttgtcagagatgcagtagccaggtgtgcggaggggctaggaggatcacggggaaaactgctgtgacctcggtggggcccaaggcagcaccccccgccagccgcgcaccgcaggcctccaggcggcagtactcccaggagagcgcgctgtccttcaccacgtagcaccagggcctctcgtcattgtccggattcctgcggtgcataagtgggggctggcagggagtcacactgcccctcgaagagggcatggggagggggcatcggaacccccagcagggcggttccccgcacctggagcagtgggaagagagtggccctccctcgggcagcctcccaggcagaggttccggggcctgtctggacggagctggccccgcctgggtcctagggagccggggggcctctccccaggacaaatcctgcctgccccgcatgcggcggcctggagcggcgtggtgctgaccggcagtaggcatgggggcccaggcccagcagggccgcggcgcccacggagtccacgtgcagctcctggtagagcagatcggagttccaggccaggcagctgaggcccgaggctgaggtgctggccacgccacggtacccattgccgttccccaagaagcagcgctcatcaggctctgcgggcagaggggcagtgaggccggcccacggtgggtccacccggcactgccccagggcaccccggggggctgacccactcaccgatgttgcagagccgtccagcgaagcctggtgggcaggcacacacggtggtcccggtggccacgatcaggtggcaggtgcccccgttcaggcaagggctgctcagacaagctgggggcagggccgaggagctgggccaggggccgcgcagtgccccacgacagcggagtcggggccggggtccaccccttgtcccttgtttctgggtgacctcaggccattcctcccactcgggtgtggacagggacacccgtcaggggtcagtggcacggctcacaccccgtggcgcacctgtatgtcgggtgccttcgcaccaggtccggcccccgaagcactcgcactgttccacgtggccctggcgcacgcgggcccagcggtcgccccgcggcaggtactcgtagcgggtctcatcaaagcatttctctgaggggtgcacagtaagccctcacaccctgccacctgctgtccccgtgcagggcccctgccctgcactcgggagccacctgttctcccatcctccggggacttgctccggcccctggacccctgcggacctccgaggcccagctcacctgtgccgcagtccttgccggtgaaggcccgggggcagctgcagtgataggactgggggtcctgggtattggagcaggagcctccattgaggcaggggccggaggcacagggatccagggcagctggggacatgcgggagggggtgtgaggggcggactgggaggctcagggtccctctgtgacattctctgcttgctaaggcgtccatcaggccccagtgaggggctctgagagcaaaggggccctctctacgcccctcggggtgcaaggtccctgggaggggcacagacctccccttcctcccagcgtcccccactcaacacctgggccactggcccagctgtgcacgtggcttcctggaagcctgacacccacactgtcaggcagcagacccctcccatgtgtcccaggacccatgtgagcagggcggctggcaccgcaccccacagaccctgcccacctgtcccctgcctggggcacgcctgtgtggctgcagggcccggcctcaccaccaggcggcgccttggccccagcgatggccgcgcagccaccatgagacgcaggtcccacctgggagaggctctggccctaagtggcacccaccggggttaatcccagagctcctcttctgctcccctccagccaggacccctgcccgggtccgccccatcctccccttggcccttctggcctggcccagtgccccctgcccgccccaggctacccaacccagcacccacctgggccccctggaggcggggtggcctccacacagtagccccaggccctgtcccggtcgtagttgtgagttgtggcacacctggggggcgacacctgcgtgcatgggggtcccaggcagaggccccccaccccaccccaccaccctggagggtctctgggttcactgggtccgcctgctgcgtggtgagcgcctactgtgtgcccggctcccagaaaagcaggcagcgtggggcaggtgaccccagctcgggtgccccggctgcccggacccaccacttcctgtgtgcactgccctccgaagtgcaggcatgcagcatgcggcccccgtagcggaaggggaacctgcagggcctcccgtcctcggtgagtgctgtggggagggggtggcgaggtctttggtatccttgaggggctatttagcccctcaggacctccagccgcgagagagaacctcccacccagccataaggaaaagcacgacacctcctcccaggcccacctgacccaccttgggcctgggggctactgctcgagggaactgccctgggcgggggcgggagccccccactttggggtccctctgcctctggagcacttgttgctggggtctcagaggtcacagaggtcaccaggatagtggggatcgcaggggtcgctgtggcattaggttctggggactccgtacggttctaggaggagcagaaagggtgtcagtgtgggacagaccctcacactcaggtcctgccgggcaggaggtcacagccctgagcctgtttccatactggggcccccagatctcggagcaggttccaggaggacacacgacattcctgaggcctcagccaggccctgacaccttccccgccctcggcccctagttaacacctgctcagggtcactgcccaggcccaggcactgctacccaccaagcttaaaccctgacgtcagtttttggtgatgggagcagctaggaggccctgggaggttcccccaacctcacgcatccagacccaacagaggtccagagagagggggcagcccccagacccataggggcccaggccaggccgcacagggatgacagcccccaggtggggctccgtgagcccaggccccagcctccaaggccagtccagcacccacctgccctgtgagggccagctttcaacgtaagccccctgctcggacccccgccccctcaaatccccacgctctgtggcgaccctccctctggcctcctcccaaggaccccaagtagccactgggaacctctggtcgcactgcgacaaggtcagtgctcaccccgccaggctggggctggaacccccgtggcagcagcagcagcagcaggaggaggaggaggaaggggcccagccccggtgggggccaggggctggggacccaggcccagcgccccatggctcctgagctggcctgaggggcagtgggaggcgggagcagagcggccaaggcaggtggggtcaaggcttcgtggaaatgattaaccctggctgcctcccacgtcaggcgggcccagccggagaggaagtccccgagtcccctggcccccacacctgctgcccacctcactttgaccctacctggaagcccagctgtctctctggcctcggcctgcactggtcctagtcctagacctgacatggtccttgggcctcagcttagaagcctcctccaggaagtcttccaggataatgcagataggttggggcctagatggtctggcgccgctcccagtccctgcaggccacagagctggccaccatctgcctgtgaattgtccatgatgagagccactacgggcgctgggccttggaggtgtccagctctgtgcccagcacagcacagacagtagcagtggggatgggattgtccctgtcccacagacggcagcactgggggctcctggagggttcggtgctgcatcctctcggtggccccagggctggccaaaaggccaggcacagggaggagaggggccacgcaatggctgagtgtagcataggatgacctgagatcctgccccacctgcctgttctgactctgggggtggccagggccccccagcagcccctggtgatgttcagagtgtcccttcctcccggtctcccagacagacccaggagtccactccaagaagcctttccaaccccagctccccaccgccgcctggatggtacaggccaagtctgcggcagcacaaccctgggccaggtaccctggggcctgggatggagctggagtcacggaattcgtgacttggggctgtgggcagagctgcctgaggaacctcttctgcaatattggagcagccgctacggcacctcgggttcctcctgagtcagcagcgacatcccagggctgccgaggtgggaggaggggtgagtgaaccactgtggcctggagaccagcgagggctgaagctgcctccctgtatcccctaaaacccctctctctgccccccatttgcctgtctgtgcagagggagagagaatggacacccactgaccacccagcttgacaccgtgggccccagggggcacagtgcacatggaggcgtggtgggccctgggggcacggtgaatggggggttgggggttgggggggaggtcatggtgggccctgggggcacggtgaatgtggaggcatggtggtctgctgggagcacggtgaatgtggaggcatggtgggtgctggagcaggatggatgcgggcttgtggtgggtggtacacacagctggcactgggcttcatcttccattccgacccctcccccagcccccttcctagagcaccactaagtggggtgcatccactccctggaagcttctagaacagccccaggggactggctgtgctctcgggcctctaggatggtctgaggagctcaccaaccaccctgtaccgagggtacttggctttaggggttccatcaaggcaacctggggaatggccctgcctcttccgactcaacccagcccccaaggccccggcctcccctgcagccacacctggttccctttctgtaatcagaccctccttagccccagggccttggcacaggcccagggctctttctagacttcctctgccgtccagttgcagtttacatggtccctccccagaaaggccctcagaccaccctgctaaacaaggctggggcagggtccccacgtgacggcgagagccagtctctgccatctggtcctggccctcaggccccaggagccaagcttccctctcctcaaagcccccttgaccttaccctggggcacttctcctcctcaggcccctctgtttcctgcatgacctcctggggatgtgctcggagtccccgagaacgaggagtctgtgtccccagcacccagcaccaggccgacgcttgggtcctcagaaatgctttattgggcagcaggaggccagggccagggagccccatggccagcatggcgaatgtccggggccagtgcctccagcgaggtcaccccctgccctcctggctgggctcctgagggtgtggtggccagggtggcccccctgaggcccacagaatccacctgggctgccccaccccgacatgtccacaggagagttggccaggccagggcagctcagacgaaggtggcgtggtgagcgctggtcttgggcttagcaggctcacccgggacggggcccaagccagggaggtctgatgtaggaggcccaccactggcatgcgacctcccagggccagcctgtgcccccgctatgccaccatcccgcccgggcgccgagccagttacaagatccacatcgatgattctgttgactgggaggtctcggctgccatgggtcccacttcctgtcacaaggagaagagaagctgtcacttgcctggcccggccctgggcccccggaacccaccccctaccccgaaggcccctgcacagacagcatggtaggggtccctgaaatatcccaaacacatcccagaggcagctggcgtcccgctgtgggcctccaggctggggcaggtacgcccaggggaggtgcagtgttcccagagccctccacataacacctgccaccaagtgggggagccgacccactcagaaaccctaccaccctgcttccccactgcagctcaggaacagagctgggcccccggcagagcccccgccccaactgcccccctaattcctcctgggggcgtcctcaggggcccccccaggcccagggcccatcctcaagggccacccccagggggctgagcactagggttcagttccagataggctggaccctcttggcctggtggaacgggccctgagccctgtgtctgctgccccatcccaccctgccaggctggccacctgctcgcccacctgcctcgctgcctcagcaccgtcttcaccgtacacaccctgctctgggcctcccggtcgtgtcccctccccctccatccctggcccccctactgaggcccctctttccggctggtcagtgactcttgccccacttctggctccaatgcccactccagccccaggagatcccggctgcctgaaccggccttggaagcttctagacccaacatgggcaggccatctccttgccagcacccccgggaggcctccctacccagggcgtcactgccctgccacatctggtgacctccacgtggacccctggaagacacagttgtgtctatgccagggtggagtccccaggggccaacgaaggctggggccaaggaaagtgaacggtgcacgcagaatggctgggttcatgtgccgcccggagctccatggcaggaccccagggcctgggaaggggcagtgaagcccccgtgctgggagagcccagcccttcccgcccactgaccccacccccccatctgtacggtgggggtgacgttgccgacccccccagtgaccccacccccccatctgtgcggtgggggtgacgttgccgacccagaggagcaggaaacgggggcaggttcctgcgtacctagcgtgtctcctaggcaggggtccaggagctcccttcctcagtgagcctggggctgaggccctgagacagtcatgtccatgccagggtggaggccttgaggcgcctatggggtggcaggagccccatgcctgggcccacagcagacaggaggcaggaagagccagcccccggcacatgagaaccagggacagggggtccctgctaccaactgctgccctccacaggtgaatcgaaggcctgggaaggtgaagaccctcctcgatctacagttctgaggtccctgaaatggccgcagggtccttgctgccccagcggctccgtggccaccaaggtccccaatcccagcgtgcccctcctcaccctcagtccaagcttccggaagcagcctccatgaggcatctgtgaacaagtccgggctgcgggcggaaggtgtgactcccctcttgagcgtgcccagcccgttctcttgaacaggtcccagcagtggccccagaggccctcatcctggcctcgacgcagcagcccagccagcatgtgggagctgtgtggggcctgtgtgtcttactcagccaggcccggtggagatgccatctggaggcccaggggtccatgtggagcagctgagactagaaacttctcccagtcaggcctctgctcattcaacaagtgtcctactaggttctgccagggctaggagctagccctgcccccaggggacaaggggacagttctgcccatctccttcttgtcaccaggtccgcatggctccagatgccaggctgcagggctgggagatatcgtgtggggagaggcaggggtttgccccctctcgccggtcaataccgtgggcatttgggcatttgcctggagtgttcatagggctctgaaggggcctgcaacaccacacatgtccagaagcccggctctaccccgccagccccacatggacagatgggaggacaggcccctgagggccccaggaagctagtgtgctcaggatggagaaacacttgtttctggagacaggacagctctgtatggaccaaggatgtccacatcacaaggagggggccacagccaggcccttcctgcctacgggagccagcctcgccctcctgtgcagggcagccagccccaggcctgtgactcagctgcctggccccgccctgagcagcacgctgcctcaccacctacatgccagggcctgcccggggagcaccttcttgcccagcatttccctggcagggatggcaacacagaggacccagcagagcctgcaccacctccagaggggcctggcctcctggtctcactcctggtgccacatctccaaacatccagacctgaggccacactgggatcttgttccctgccgcttgggccacctgtgaacctctccccggcgccccacggctccctgccctcggctggctggtcctgccggctccgactgtgctgtccagccttcccaggagggggtcctgctggaggccccacaagatgcagcaggaaggcccctctttccacatgcgcaggcccctcaccggctgccggtcgcccccaggcctcccagacacttgtccatgaatgtctctgtgccagccactgccagctgctctggcctaggcctggggcaggaccccgccccaccctggtcctcaaagctgagtcaggaaccctggcaggcacagcgggagcaggggctgcactggcctggccggggcaggggcatggcctgaactctcccaggctctccttcgagacccaggcctggcacctctcccactgcccgcccttcctgccccccgagggaccccgtcccccaggcactttgctcagcctctgcctccatgctccacatcatctgtgctgccaagcgcagccacctcctctgtgaagcctccccagcgccccttggaagctcgcagggcacaaggacacccaggcaaggctgagccggctcacactgagaacacggcaggaaggggggagcgaggggagccagaggcggggaccctacaatccactgtggctcccaaggccccttcccttcccagccttcccaccacagcgcaccccacgggctcctgctaaggcctgtgcactcctgctgatgggcccccatgggaacgagagcacccccagaaccttagttccagagtgtgacccccccaaggtccccctgtccgtgtgggtccccagccaggatcatgactgtgtgtgatgggctggggctgggatagagctcctcaaatatttgctgggcattggcgagggagtggacagcgcccagcagggtgcacagtgtggtgagtggggaataggggagtggggaataggggagtgggggtgactgagggcacaggagtgcatgtggcagaccccagggaggggcttcaagccggagctccagcagtgcgggctgagatgggcacaggtggccagtcctggagggaacatgggggtaggccaggtcacagtcacttgcaggcctgagacttccactctgcaagacctggctggaacttcaggtggaaggcagacacttcaggggaggagggggagcaacctagggtggcttctggtgggatccgggaggaccacgtgtcacaaccaggctgggggctgtggaggagggccgaggccagctggtcagttcaggaatcccctggggagccacggagctgggcaggagccaggagatgctggggggagacagggctctggggagacggggctctggagagagggggctctagggagagggggctctggggagagggggctttggagaggcacctagcagatgccctcagcagctttgcaggcctgagaccagtggcaggctcctggggctgtgtccccaagaaaaccagcggtctcaatccacatcagagtgagggggtctaagctgcatctgctcctgcggagggcggggcacgggagctgccgaggaggcctctcttggacagagcaggagccaggtggggctgcatcctcacccggtacaacacaatggccatgccatggggggtactttcacccccagggtgaggggcgtgacctcacttccaggctgcagaagccccggcaggcaaacatcgcacatctggcaggtagctgagctccgggggccctgagggcagccactgggcccaaaagtgttcctaggggatactggcagctgtgacactggggcctccaggttgagtgacccctgagcccgcccagtgagctgccccaggggaccccagccccaggagagctatgcggggacccctcctggggtggtgcctagcatctccctgccggcaggtggagtccatcctcttgggatgtctgcaccaggagctcagtcaggccatggggctgggtactcagccttaccaaaggggctgggaggagccactggcctccagcccccagccaggacccctgactgtcgccttgcagccagcagggcagcagtgagaccacccagctcccgggctttttgttggaaacgaagcagatctggttaagaaagcaattgggaattattaccaacacaaccgtaagaacccgttttaagatggcgcgtacagaaggagcactgtgcattggaaactcgggtgtgggtgcacgcgaccttttgaatgcctctctcctttgtgaaaacacaaagcgcagacgtctgcttctgtgcaggggtggaagatgactgctaaaggcgggacacagcagtgctggagggacagctgctccctccccacgagaacagaaggtgagcattttggagggtccctgtgtcgagacacagatatgcacaaaacgtgccatgcagacacatggcaggtgcacacaccgacacatgccacacgaacacacaccaggcatgcacgcacatgggtatatctgcctgacacactgatatggtttggctccgtgtccccacccaaacctcaccgtgaattgtgataatcccccggtatcaagggtgggaccaggtagaggtgactggatcatgggggcaggtccccccatgctgttctcatgatagtgagtctcaggagagctgatggttttataagcgtctggcatttcctctgccggttctcgtactctctcctgctgccctgtgaagaggtgccttctgccatgactgtaagtttcctgaggcttccccagccatgcagaactgtgggtcaattacacctcttttctttataaattacctagtcttgggtatttcttcatagcaacatgagaacggcctcatacacacagcactgtgtggacacatgcacacctctgccagcgtgccctggagcctcacgaggggcctgacacttctcccgcttgaggcctctgttgtgtgtgtcagacagctaaggctcagggccattagactgggtggcctggcagcaagtggccaaagggaaaggagacccacccacatgcctcccgggaccagacatgcatgggggcaccggccagcctgcatggtgcatggtctcggtctcggtgcgtggtgctggggctagacagacggggtggagtgccgcgtggcgtgtggcgctggggctagaagcatggggcggtgcggtgcatgacgctgaggctagaagggcgtggtggagcaccacgtggcgcaggggctggaacagggtggcatggcacgtggtgctggggctaggatggggtggtgtggcatgtggcactggggctaggacagggtggcatggcacgtggtgctggggctaggatggggtggtgtggcatgtggcattggggctaggacagggtggcatggcacgtggtgctggggctaggatggggtggtgtggcatgtggcactggggctaggacagggtggcacagtgcatggcactgaggctggaagggcaaagtggtgtggcacagctctgtggagactccccctacctcaaggctgttgctggcagcccccacgcgtagccggcatgctgcccaccatggcaatggggagggcgggagcccgtgggcttggctacacctcctgttgtgtttctcaccccggacgctgggtccagggcggctgccacattgtgaggaagcatcccacagcaactgtcaacgtcggagagcgtgacccgggatgacccccaagctcctaaaccctgaaaacggacaggtcagcactcagtccaggctcgccccggcccacagatgtgaaagaggttccatcaggccaccacggcattcacagcctgtttcctttgccgccatgggcaggtgaactctccaatacagagaatcccattagagtgggggttccagaagcaagctgcacagagcagtttctgtcccaacgccccccagcaggcttgagccaacatcacaggaagactgggcaggtcctcagcagttgtcctgtgtcgccacggacaggtgggtgggggacacacacctaccacctatggccaaagccactcccacctccttctcaccactcactggtctcctcctaggagacagcccaagagccaaggatccagggtacccacctgcccaggggctgaggagccagcggggcggggaaccagttctggccagtggcagtcggggcagccaccagagcgcagggggacctgctcctcccaaggccggtaccacccaccctcctgccacaaacaagtcagggatgtcagccggggcgctcagctgggcctgcgctgtaaaccacctctgtgctaatggcccttggcaggcaggagaactgaccccccacgtgggtctgtctggccctcccaggcagcctgacacacgccacacctgtgcgcagagccagccacagccccagggctgcagggccggggtgtgggtgcgggactgcagcccgaaggccagcaggccagctcatctcagcacccgccaccgggccaccagctcttctgctgtcccgccgcacagctgtgctgctgggagcacaccaggtgctcaagagttttgttcagtggatggtatatttttaaaagccagtagattacggtaaatccacttaatctcctaaaaatgtgtgatatttcccctagattaaaatacttttattattttctaaagtggaaacaaagtttcaaatgagaaagaaaagttgtaagccagtccagtgatgatgtccagaatttattacaactggaagaacagactcaaaacgcaggtgagagccacacaggtgtccaccaagacggatggagggggactcaggccaggggtggaggctgcagagtggcaccggtgggcatgccaggcacctcaggctttctcatccaggcgtgtcctggctgtgaaagggaccaggtagcccctcccatgccacaggtggcctccaaaggcccagatatgtacagatctacagacgtgcactccctggtcccccggcgaggtccaggctacaggtctgacaagaccaaacctcacggcaggcctctcactgctgtcagcatcctggaccagggcacaggacggagaggcgctcccatcgcccccagcagcaaaccacagcagaggtgtccacgcacccctgagcacactccatgacgcgcaccctgagcggctcctctctccaggggatggccacgcaggccacggccctcggacccctggaaacacctttccctaccggctgctgggagcctcgcctcagtttctggtatttgtggctcacggaaacatccctgctgccaggccatcctgttcaccttcacactcactgaatcccctgcttcctttgagaaatgcccgtgacacccgcggtcagagagcgctgctgacgtcacctccactcccgagcacccacaccacctgctacgggggccgccggtgggtccgagctgcactctcaaggctcttccgaggacgggcctgtgtctgggagccctctcctgctatgaacacagcgggcttcacttcctcactcaagacaaatgctattgttttccagtcttgagacagaaacactaaaaacgatcgctgtccagatttggaaaggaatgcctccattttcggaaacccccaggcctcacccagggtgttcccagacctcgctgcaggcactgccacgtatcattcctgcaagagcctctcaggacaccaggatgcctgcccagagcgcctcggggggaccatcctgacagacactggcctggggccacacgagcccctcctttccaagagggccaaggaagcccccaaccagcaggtgaggagggggtcacggagaccaccagcaaacagtggcagccgggggcccactgtcctttctgactggaagctgagcagaccacgcttacggggccaaggtggagggatcagaacctggaggtacctggtctggaaggtcctggcacttcctggggggtggagggcggcggcagcaaggtgctgttggggctgctgatgtccccctcccccatcagggtcagctcggccacgtgctcatcctccaccgtctggatgcccccggcctccacttcctgagactgcctcttccagatctgggcggtgccctcctgcgcgagggagacgggggactggggagtgcagaagggcccgctgggagacttctgcccggggggggtcgtcccaggaggtccaggggggctggaggctgagcccgggctggtggacgggctgtcgctgctctcatggactggctcccactgctcgccaggctgggaggcgctcttattgccgttgcctattgcgcttctcctgctaagagccccggccacagcagctggagtggggagggtgagttctgtggaaccaggaggtaaacggaggaactctggcaacaccaggtcttccttccttagcagcccacgttggtcatctgctctgttgctctgagctttggaaatagctcaaaaaatactattggaagaaaacccaaagagaccgtgttttagagagtttcacattaatgactgtcaccgcagaacattctagaaagctctcatcctgggctgtcctaacaccctatcagctgtgggtcaacaagagcccttttccgtccacactatcttcccacagacagcggaagggacagccctggggcttctagcatactctgtcttcaggagtctgaaaaagctgtgtactccctaaaaaccacgctgtgtgaggtccagacttgaacaaacgagacgcttgactcaacacggttacgcgctgatgccgtctgagtaggaaactgtgggactctctggcctgggctttcaatttaacacttggggccctctgaggactggccccctcctccggttggtcagcatctgaagcacccgcccgggtcccagctgcagctgcagtcctcaaagtcgggagcagaatgaacccgaggaggggtggtagaggaaggccctgagacgggtggtctgggaaggggcaccctcaaatccacgcctgcctctcggggtcactgcctctgggcagagggtggtcctcccaggcctagggcagaggggggcaacacgtgctctccctctccgcactgaagctccacagccccgaggggccaggacgggtgcccctgggcctcccactgcccagccactgtgggggcctgcaggtgcctccagcttcttggctggctcctccagaactctccttttcttacctgggctgggttttctagtgtagcaggccccaaggccaccattcgaggtagatggcgtctaaactgggctttctctagcattggaattatactcggagtttttaacaactacaaggaacctcaaatctctgacttcactggttctcagaaacatacaagcttcaaagagggcgtgtgatttacttgtgctcggtggccaacaaaggctggaggtgtgttttagttttaccgtgaggtcagactccacagccagctgtgacaaagccgtgacacgccaggtggactggcaagtacgccctggatgaaaattcaggtcacggtgacagctgctggttttgactctgttttcaatgcttctccttgttataaacttctggagaaaaaggagcttcaagaaaggactcatctctccatctcagtcttccagtgtgcctgttgtctctcctggaggccaggggtgtgcaggctgaccttcctcactgacccccgcagccaagagagctcagcaagcccacggtccttccagaccagtgtgctccacctcccctcacctgggtgcccagctctgcctagggtggactctctaatgctaactgtgcctccagtcacgctggggaccctggcacaagccagtggtggggccatagggaggagctggggtgagagggaggcagagcctgcgggggcctctggcatctcagggcagacagtgctgctcacatcggctgcccctgatgccctaggaggcctggcactcagtctcaaaactggggtttcggtggagtgatcccaacagcccacagactgcccccgggagaaacatgtcttccaggccacagggacggaccgcagtcacccagatgctgacagctcaaagcagatctactgactatactggaaactaactgtgcatttactaaaaacgtggaagttttaaaaagttcacataccctctgcttcgtccaaattaattttctgatatttttttttcccaatctttgcaatagattcttctctctttgaaagccggggatccctagcattttttccattttctccttttattttaatagaattagacttgcctagtgttctttcctctccctgcattagaaggaaagtcaaagttctactttcatttcaatacacgacaatacatcattcattagttagagagtagaaggctctatgaaatagattgcattgatacagaatttacatgcattgcagaaaaaccattgcaatgataaggattacaaacaagaatagcatttaaggcacaaccactcccacctcagaagaaaagaaagccagtccttcacaggtaagagggagctgggcatcggcagggacgagagagaccccgccaaggagcgtgggggagacacacagtgataagcaggcggtaaggaagcaccagggcactgcgcagggcaggcgggggccacagcgagaggagcagggcacagggtgggccagggtggggaattaccgtagccgagtggtttctggagctggaatttacagctgtgttctgtttcactggcacacctttctgtttatctgcggatgctaaacataagaaagctttatgacttcagggactcgcaaatccatctgaatgtttcatagacaacctgctcctactgtctctgagagcaaagctgtagagaagccacaaggcatctgctgcccttattcaccacgcacagccctgaggggagtccccatgggacaggagagagggcccgtcctccacgcacacagccgggctccgtacatctaactagggacttgctggaggagtgatgttgaaattgaaaagctcatttcatatactatttggcataaatattctctagaaagtcagagtcttacatttatgacatattttctttctcttttctttcttttttttctttttttgagacagagtctcactctgtctcccaggctggagtgcagtggcacgatctcggctcactgcaacccccgcatcctggtcaagacatcctcctgcctcagcctcccatgtagctgggattacaggcatgtgccaccacacccagctaatttttgtatttttagtagaaacgaggtttcaccatgctggccaggctggtttcgaactcctgacctcaggtgatccacccaccttggcctccaaaagtgctgggattacaggcatgagccactgtgccagtccatgacatattttcaaatacagcctttgccccatgccagggccacagggtggcctctgctgccactaacggcctcaagcccatttctgtggcccaaatgtgactggagcagtcgcgctcctgccccacatacagccctacaaaaacgctgagcgccaagctccaccacaggacttgcctgtacacaaacaagccccgaggcccagcaggccctgggcacagagggtcagccggggcaaagctgctggccgccctgctgggttacacatgctgtgcctgccccacctgcctgggtgggtgtcagggcccagcgtaaggctttccctagagcaaagggtgggctcggggaagggtctctgctatgtgaggagttggggaggaatattcaagagttggagctccaggactaatggcctcagcgcttgcttctgactgggactccatggcccaggtctccctgggtggggacaagtgagccacgtgctccctgcgtgacatcatcagggccaacaacctgaaaggcagaggggcagcccaatgtcacctgaagtggctcctcacaaagtgagctctctacctagaacatctgcaggtgggtttccagaaagctctttccaagacacacctccctacggcacctgcacctgcaggccccaaggccacgcctctgcctgtccctcgggacagctacaaacaggacccaccctcctgggtctgagtaaccttcctcacgcacggttctcaacaagggctctaaggagggccggctcctgcgcgtcaggatgaggtgggggccgggcgacgagcccatctccgaaggctgctggccggacccagcttccccagggcaggactgtcatgaccaaggcaacacgttggaaagagctctgtcgaccgcccgattccctgcacgcaaggaactgcagaaccagcccaaatgaccgagcctgcagcctccattttgccgggcagagcacaggcgcctactgccctggcttcctgttttgtgcctggagggaagggcgccagatcagggcaccaaggagggaccagggggcccagaccaattctcttttgtgtactaactccaaagcctccccctcccctgggccagccccgcctgccctctctcctgcacaagccccactcaccccctcccctgcactggccccgctcgccctctcccctatgccaaccccacagccccctcccctgcgctggccccacttacacctctactctgtgcaggccccgcccaccccctctcctgcgcaagccccacctgcccctcccctgcactggccccactcaccccctcccctgcaccggctccatagccccctcccctgcactggacccactcaccctctccccatccgctgcaccagccctactcaccctttcctctggaaggatccttctcctccaagacaacccgctgtccgtccagactcgatataggggcgccaaggtccaggggctccttctctccactctagggcagagatcagcactgaataatttacccagactggaacttcagggaacagatgtgtgtgatcccacccgactgcatgactgtcctaggcttgatggagtcacgcaggagatggccccgaggtgaggcctgcctgactgaggcacacaagctggggctgagccatgctcctgacatgggtcccgactacacgaccatcctaagctcgatggaatcacgcaggaggtggcaacccttggtcgctgctacaaggggaacactgaccctcggacgctgctatgagggaaatactgaccctcgaaactgctatgaggggaatactgagagcagatgttcccctttgtaaacaaggaagcaaagacagacaactttaggaccaggtttgaggctgaaatgaagcgccactagccaccgggctggagttcttgtctctgcatcagagctctcctctggcagagaatctgactcttcacctgccatagtcactgttaagaaaagacatctgaacatgtttggcattcacgatctgtcagtcaggggaatgacagctgtccaatgccaggcgggagaggctctaagctcctgaaggggctggtccgctgggcaggcgtggtgggccctgcgggggaagcagaggaactgccccaggtcccgccttctccaccacattcgtggacacagggggccacagaattcactggagaggtcaggagacagcgtccaaggaaaagccacatcccaaacaacccattccacacgaatcctccatagcccccacagcctcggcagccgagggccgcagctcacagggaacgagcctgaccgcagccagcccttccaccctggtgccccccaaccatgccacgagcacgctgccacgaccaaccccattttacagtcagggaaactgtgacacacaggggctaaacaattgcgcagcgtctccccagagtcggccagaggggcacacctgggagccaggccaggtctgtctcccacctgcagatttctggactccaggatggagcctgcagcgcggggaagaggcttcaggttaccctcggaggtggtgtctgtaaataatttaataggttcttcttgttcacttcaaagctcttgaataattttgagtgtagtttcagggaaaactaaaatcctgaaaatacttgaaatcattgctccaataaagttttcaaggaaagaagactaggcagacactgtgcccggaacccccacgctccagagcaccctcagcggggcccagctctcgccatctcgcgtggcctgcccagcacctgcggtcaccaccccacgcggtgttttctttcttaaccccattcacatcataatggcgcagcctggaaatgccagctgagttcttccatctacaaagtgcaggtgagaatcaggacatctccatgtgaccgtgcactgggggcatgagcacaatgcccgggcccagcaggtgcagtgggggcagggccatccgcactctcttatctgatcacattggccaacagcggaggatagtccagggttggttgctttgtttctcattttggcctccctggagcaaaaccacctctcaaatatcaattctttttggaatgaccaaggtacaaataaaccatgatggctcccactgcacagaacgagaactggggatggcagaggctgtctcctctcctccaagggggacaaccagatcaggggaagacaccgcttcttggtgtgccctcttcagtgaacaacacagaggctgccaaagggaacagacagtgcctgcggtgacgacgcccgggccccgtgcaacactcaccagcctcaccagcaggccactgaggtccaggccgtatctggccaccacgggccgcagcacctccgtgacgggcttggtgggcttggccttgagtcccactgaccggttaatcggaacaagatccagcctggtgggggatgaaaaaattcactaccaactcatgtcagccctcattaggagatcagtctcacgagcagaactacagcacagccccaggccgccctcaaggcctcggtgtgccccccagttcagccccagctgatcagaacgtgccttcctccacgtgggaaaagtcaggccaagcaagggctatggtctcctcctccagggatagcagtgtcctgcacagcagcctggctacctgtggggcatccaccctacagagagcactcctgcccctccctctcggcatcttagggggctgggctcaccaggccagggcagtccctgttcacgggacagggaggagagggcgcctctcacccccgggcttgtaggggggctgcctcgtgtgggcctccaccctccccccgccccgacaccccatcgtagcccagcatggagcatccacaggccgcccgctaagcgcagagaccagcaggtggtgggcacacggggttggctctgggagcctcaggtgaatgacagcgatcttcctcttaccgaaacaaggtgcgcttttctaggcgcaggtcccttgactccaagatgctactgtcttggtgcagcaccagaggctgaggaacagagagaccagaatcaacgtgggcacagcaggcagccccccaaacgcagacccacgtgccccaggcacacagctgtgcagagcagaagagcagcttcaaaaacagccatccaaagaaagcgatcaccctttccacaccaacccagcacccacgtgcaaagtgctcccagcagatagctcagttcagataatccggcctccgccccaggcgctgttgaaatgaggagcgcaggagggggcagcctgaggactctgacaaagctgggggccagggagcggggaggtcatggcctgagggcagcacgagggtcaggcgggcccagtaccttgtccccgcccaccaggaagaggtccgcggccgccccgttgatgccatgccgctcacagagtccggacaggatgtctttgatggagaagcccgccttgacagccaccacgcaggatgtcccatccgggagatgaatgcagcagtgcttggtggccttgtccttctcgggtgccaaagtcctgcaggcctccgactggggagcagcgagacaagcagccgtgagggaaccagcgtcacaggggtgcggggcacctcccagagcagcccagctggcccaggccgcacgtgctggggaggctggcgccctgccacggtcccacctgcagctccccaggtgcacacatctcaggctcagtccacactgcctgaggtgctgggttttgtgaattaacacgagagagcggtcatcattctctcagctctgggcctcaagggccatcgtgctcagaaggcacatctgggcttctccacccagaagcagggctgtcctgcggggcccactgaagctgccctgtgaggaccactccctcccagggctctgggttccagcaccctgtcctctctatacacagctccccatgcacatcgttccaatggaaacgtcgcctggactgtgacttcgtcggcactgccttccggtagtctgaggtctcttttccctgagcattatttcaggaaactagtttgtacagtggtaggctggctgcacaagtggttcccaaccatccccttccctgtatctgtgcccctcataatgcggctctgtggctcctcccatgaagaggtggagtcagccccagcccagacctgggtgggcagaaggagcggctccaagcctgggcctccagaggccgtccttactctgctcactgtcagggtccctgagccggctgtgggacggggtgaactggcctccgctgagtgaggcgaacgaagggtcctgtcagtgctccttccccagccaagggccagccatgcaactgagggcctctgggaccagccagctggctcacgtgccaggtaaccagaaacacacggcaaggccggccagaatgggcagaaccacccaggcgacccagacacccagcacaacagtaattgtttccagcctctgagtttgggggtgcggaggtattaggcaacaagagctaactgatacctggtaaatccttacagctttcaatgttatttggaacaactgaagaagaaattatattctacattcattcctgcctgaaaatttcaaatgaccaggatgctggcaaccagtgaggttttccaaaattcctatcaaacaacatctaacaagctcacgagtcctgcctgcgcctgctcatctccctcatctgctggaaactggggccaggacgagcaccagccaagcagtgagcaggtgtgagagggtgtgggtgagacaggcggcccgcaggcagaggggtaaatcctgcagtgtgggagtgggtgggatgctcacgcgctgagacagggagcgcctgatttccacaccttctgttgattcttagtgggagttcacaaaaactaaattacaacaaaaagacttaagaaataaatccaaagatactttgagttccctccctcgtataactaatagtttttcgtgccctctcaggagccctaggctgggggaccatgaggccggggcctgatggggcactgggccaccctgcactttgccactgtgcctgggccggcacccgagccttgtcccccagctttacaaagtgaacgctgagttttgtaaacacaggtttccatgggagagaggtgtcatcagtcagctggtggggacacccctgaggcctgtgggacgaggggagacagtgactcaccaggtccaggctccccgcagaggacacagagccctgcgactctcggcgacacaggcctccattggcatgcagggcgtcttgacaggggaaacacagtgactcacgtcaatcagaaccctgtttattcggtcacatctcccaaccctctgccccctttaggctgagcagacagacgccaggaagccccccccacccatcccccaccaggcatcactttgccgtctctggtggagacgagtcacatgtgtcttcctaaccctggaagccagtcagggaccaacaaggctctacccaccatgcagcagagatgctactctctgccctgtctactgccacatcctggctccaaaacatgcttggctcatggcaggtgcccaacaaatcacatcagtacgtgcagttacacagcacagacccaggtgcatgtcccggtaagggcctttcctccattccatctggagctttcatccccaaatgtagtttctgggcctaactggaaacccccaactgtggcaacagccagcgctctcagccggatgcggcctccagacccactcggtccacgtccttttcctctgacgtcctgacatgaaccgtaatgaagtgtcaattttcaccaacctcaactaactatattcttaggctaacctacaaatcatgaaaattcggacacaggacttttcaaacagcacctgctcccaaaccacaccgctgcacatgggctctggggcctgaggagagaggggaaggcagctcccagacctactggcctgcagactgcagccaccttccacaggaacagatgcccaggccacatcctgggccaagatcagaatgtgttacttctgggggtgcctgcagtctgggttttattttttggttggctttgtgttttttagagacagagcgtcgctgtgtcccccaggctggagtacagtggcacaatcatagctcactgcagcctccaactccaggacccaagcaattttcttcccacctcagcctccccagtagctagggcaacaggtgcgccaccacacttggctaatttttaatttttttttgtagagatgagtgtcttgctgtgttgcccaggctggtattgaactcctagactcaaacgatcctcacacctcgccccaccgccaaagcgctgggatttaaaggcatgagccaccaggcgccactgctatcaaggtttgctttcatttatttatttatttatttattttgagacagtcttgttctgtcacacaaactggagtgtagttctccactcactgcaacctctgcctcccgggttcaagcgattctcatgcctcagcctcccaagtaactgggactgaaagtacccaccatcacacccagctaattttttttttttttttgagacggagtctcgctctgttgcccaggctggagttcaatggcacaatctcagctcactgcaacctccacctcccgggttcaactaattctcctgtctcagcctcctgagtagctgggattacaggcatgtgccatcacatctggctaatttttgtatttttagtagagacggggtttcatcatgttggccaggctggtctcgaacttctgacctcagttgatctgcccacctcagcctcccaaagtgatgggattacaggcatgagccaccgtgcctggcccctaatttttttttttttttttttttttggatttttagtagagccttaccatgttgcccaggctggtcaccaactcctgagctcaggcaatccgcctgcctcggcctcccaaagtgctgggattacaggcgtgagctcccacgcctggctctatcaaggttttcaaagccctttgcagatctgccaggtatggggatgggcacgagtggatggactgtctgaagcgaacactcccatctcccaggtactcgggaggcctggccccacctaataacatagtgtccatctcccaggtggcctccgacaaaggtgaactctgcaactctcagctgcctttgctcggagaagagcacctcacagcatggccagaagctcagggctgcccacgtcaagccctcaccagcgcgtccttcagcgccccgggaacaacgcttccccctgcaggcggggagcagccacgcacaaatgcttggcactgcagggcacacacaggagccgcagccacggagcgcagagcaccctgctcacctgcctccaccagggccatgccagctggtgctatcgcaatcacctcactgcctgatttaaacttggagaccacaggctaagtgccagtcccctgccttcaggcaggacactcattcctgaaaactaatccctttcccaaaaatctctagagaagaaaatcttcccagttctcccctatgtgcttttcagcacctggtacagaacagcctcatcttcgccagcgttcagcatgggcatctccatgccctctgccctgccacctgccaaaaccacccggctggtgtctggagctcggccaggagccgccaagggccctgcagccccaccccctggcgccctgggagccgtctctctgcctaacttttgttacaggaagtctcagatgtgcgaagaaaaaagggacagagcatccagaatgggcagcccccaatatcaaataccaatcttaacttgaaaaatgctcactactccaactatgctactacattttaaaaaaccacacacatgtaaaaggcacatggaccctgacatctacctaggaaaaagccctggcagagaaccaagctgccactgggggagacacccaatagcacatttgtgtgttcctatttttacttgattgtattttccaaattttctaccaaaaacacctattacttggatagtgaaaagcaggagaggacacagatgttcagccgccactgtgtggggtaggcctgaggtaggcatgggctgaaatgtattgagcccttttctctggaagattctggagcagccctgctgccctctggctggctgacaggtcgtgtccccagacacagcggcattccttattcattcagagaagcttcctcgacccgccaacagggcctctcactgcacacatggcccaaggtcaccgccaaccaccagagcgacgccaggacggggacgcggctgcctggcctggacaccacagcccaggagccaccccacaaaccgtctgcgtggtccccgtgctccctctttttctgggacctcccggtgctcctggtccgcgaccacgagaaaaacgcgcctttccgcttcttctcgctgtcctcatcccccagctcttcattcagggatcggccggattttgattttccacttaactgtcatcaaatggaaaccttggttaaaacaatgtgaagttattttactattacgttaagtgcaaaggaggcaatactgagctgtaaacacaagcactctatgggatggtatcacttctacaggtcatggtgtggccctgacaggactccagacagcagctggaactttccagcatggagcgtcacccaccactggtgaagacgccgacagggcctcttttcactccccacagaacagctctcagctgatgacacacaacccacaggggcgtgaggccagcctcggggaggtcaccttttttggcgtggacacactggagtggtctgaaccgaggctgtgcttggaagccgggctgctggggacctgctgcgagtccgggagtgcacggccctccacttccgccaggatgcattcctggtacagcggggacttcagaaagcgagtgtagctatcaaacttcatgagattgaagatctggggagaagatgtaaggtgggacagtcacaggagggacccagacatgcagcctcaggcgcgaggctgcttggcgacctgtaggcaaccactggccctgtcctgaaaggacatcgtttcagtccattttcccccgccagccctgagggtacttaagagttatttccagtgtgcctctatatctgagtcttctttctcataacgaaccagcctttatcactcttaaaattaagtgaatcctgacaacttacagaagccatcaacacgagcagaccccagagaacttttattttgttaaataagattaaaaccaaaagcgactagaaatcttacagtagactgctttgaaaatgccaccctatgcttctgtgaacgtgacccacgtgccgcagcgacatgcacaggcacgtctcgaatagcctggggcctaatgcccatgaccacagcaatgtcctacgatgcaaaacttcaaacgcagatgcgccatcccccaggcaggtgtgattccacacacgcacaggatcgaaacatgagccagcgtgaacagccggctcattgcagacagacacgcagtggttcgggacttatttcatggccctactgaaagccccactttctgtctgcgtttctctaccctactgaaagccccactttctgtctgcgtttctctacctgcgtctgtgatgctctcgatccactggcctgcctgatagcacgtgttctttgaaggtggaccctataccccgagccctagcctggactccccacaagctcccacagcctgcggttacctgcagctgctgctccttgaacatgtctgggtgaggtgcgcggaggacgtcgtctgctagctgggcctggctgtcgatgttgaccggggtggtggctttgctgcagagaaacttactgaaaatctcccgggccctgtaggaaagctgacaggaaaggcacctgagcagcccggcaaggcttcctctccccgcactcctgctgcctgccaaggcccgacacccccgggctctacagatgtgttctcacgggccccagtaaatacctcttgcttgaataaataaataaaagtgtggccagaatgcagcagcactgcgcgggctcctctacgattgtttaaacggatacttaaagtgtcccaaagacccgggcgatgctagcccagcagcagctgcgcaggggcaatactgccgtgtgtcgccacacacctggtcttggcaaggtgggagtgcaggagagcagcgccctctgagcattgcgagcagacgaaagcagccccgaagcctggaagccaggccacaggccaactgaggaaacagcagccaggccgggccaggccaaggcgtctctcccaggcttctcctgcacctcccacgaggcgcaggaggagctgcgaaagcacggcccgggatgccctcctgcctccaatttgctttcaaattcccctaaatacacgttccttcctcagaattccagcacactgaaagacaccccatctgctgtgaaagctgtggctgagggcgttatacaaaccaggtttaggcaaaattaaatatcatgtatatttaaaaatttattctgaaaaagaaatgatttttttcaagccatgtgaaaatattttatcatccactttccaactgctctagatgctccctgcaccgagccagcctccaatgaggccacgcggccctctcacacacacgcggccctctcacacgcgacctctcacacgcccctcacacacgcgacctcacacgcccctcacacacaggtggccctctcacacgtccctctcacacgcccctctcacacacggccctcacacgcccctcacacgcaacctctcacacgcccctctcacgcccctcacacacacccctcacatgcccctcacacacgtggccctctcacacacccctcacatgcgtctctctcacacgccactctcacacagcccccacttcccaagcgtggacttacctcctttttgtcatgtgcaggaacatgattaaaatattcacaggcctgccagaataaaatgttttcttcactgaattctttccttagaaaatcctaagaaagacaaagacaccatttattaacactgacacagggtcctcctttttcctacttccccttctacagaaaccacggggtcactggctgctcagtgagctgcccgagggcctggagagagaaacctcatcgctgcccagcactttagggaaccgcactgctgcttccagctgtttccccaaaagcaaaacatctctttgaagagctggcaacaggcacctggcttcttaacacagataggaagctccagtgctgcgggctgcagagagaccccagtagagagcgggagggccagggacgctccctgggggcagaacggcccccccccttcaacccaccctcctctgagctcttgagagggtggcggtccagggaggggagacccctgccacggggctgctcagggcccgcagggtgccgctgtctctagggcggcccacagatcctgctcggtagtctctgcagagcacagaccgctccgctgctcctgggcccttccctactcacagagaagtagcggacaccgacggggtcctgcagcaggcgctcaaaggacacggcccatctggcgaccctcctctcacgcaggcgccggcagctctgcacgctggggaggctggcattgctgctcaggctgttgttgctgacgcagtccttcaggtcggcgcccgtcaactctgcgggaccagcacagacagcacctgcacccctgccctccgccccggcccagtgactgctctgcccgcccacaggagaccctgggacacgcagcaagctctgtcccctccaacacccattcagtcaacaactatgcacagcacacctaccacctgccagtgcattctacacacagggatggagcagggaacaaaacacagaccccaaccttgagcggctgcacatgtgtgtgcacgagcacacacacatgttcacatgtgcaggcccacacagcacccttgcacgcacactcatatgctcacacgtgcacactcgcccaagcaacaacaaactacagccacagggttgaacaggaaaagcaactaaccttacacaggagcatgtgcacacagagcactaagaccatcatggcaacaagatgtttcccaaacaggcttgctagagcgaaagcagctgggcgcggggcgccgcgtatgccacgtgagttacgtcctgacccacggtgccctcgggagcgtgctcagtcgaagggggcacgaggctcaccttccggatgcgaagcccacacacccgtgactgcacactgctctgcatgtgggctccttctcaacacgaaactctcaggcacagtgtccagagctaagccctcagccacgcatgtcggctcggcggctcatttacaggagacccgatgtgggatatggcacagcgcgctcccaggacaccggatcctgcctgacgtgtctgcaaaacggccctcagtagcctttggttcccagtatctcctgagctctcgaataaagagaagggaggtccccagggaaatccccgttcatcacccttgtccactggatgcgagcagtgtgggggcgccccccaacatcctgacgcgagcagtgtgggggggcgcccccgtccctcctgacgcgagcagtgtggggtcgcccccgtccctcctgacgcgagcagtgtgggggggcgcccccgtccctcctgacgcgagcagtgtgggggcgcccccgtccctcctgacgcgagcagtgtgggggcgcccccgtccctcctgacgcgagtagtgtgggggcgcccccgtccctcctgacgtgagcagtgtgggggcgcccctgtcccagagtggccggcctggcctgagcccaagaagggatgtgggccagtgtgagcccagcttcagggaccgctgcccaccgtgccagagcacgtatgtctcctctgtgagcatagggtgtcccacacgggctgtccttagcctgcagctgagccatgccctgctgaccacagatgacgtgtgacaaggtggccactaaacctgtgttgttaagaagccctgggctttgggcttggttttctgctgcagctttatggaatgcagctgactgacagagcagcctcacagaatgttctcagcagcataataaaatacgctatgttcccctcctgccccttcaccagcctcctgtggcacggtgcgcaggataagccgcccaggctggcactgctgtaaagtcaaggccacaggactgatcccagcggacgagctgatgggctccagctccaggccagcaaatagaacacatcttattatcagcaaggggccaggggtagaaagagaccaggagggggtcagtgaggcagcatcaactcctctcaggggcagaagcgacactaaaccttatggattcagcccagtctgcagacgtgctgtaggcgacaggcagaggcctggcaggaggcttccaaggaggccacagcgtgggccccgctaatccagagaaaagtggagccctagagcccaggagaccaaaccagggctttgatccaacagtgtccctcatggtcagcatggcagccagaggctacgctcggcaggagtcattcaaagtgcgaagagcatttagattaaaaaagaaaatgttaaagaataatcaaataatgtaaactgctatagaaaaaaattaaaagaagaccgaaaggaagttctgggataggatcagaaacacggtggtaatgtttccttgaatccaccatgctgttgatctgttatagatcaaatgtgtgaccgcggtggccgccagcacgcactgaagtttcagaggcctgcggctggggctcacacggaagccctgactccgagctgcggtggaaggggcggcacgcactgcaagaagacgcgcaccagcgctcacacgcaggacagggcggccaagccaggagggctggggccaaggacagaaggacaggggccatgtgaggctccctcaaagaatcccaacatccaagactcccccccatgtggcaagtgccccgttctgcatgtaagccaggtgtgaaactctcacacacactcaacttgcacactcactctctctggggcaggggtccttggagtgggctgactctttgtgcttgcctaatatcctgtcaccagggaagtgaggagcaaaacatcacagacaggaattctccctaaatggacatatcacgccgatacttgcctatgggtgtcttgttagaaccacacaagtggagcgtgaaagctcccgtggaaagctaagcagaaatgaggggaacaaacaagatgagcaagacgccagagcaggccagcctaacacgagaacacacacagaccacaatcccgaacacgcagagccagacaggcctaacacgagaacacacacagaccacaatcccgaacacgcagagccagacaggcctaacacgagaacacacacagaccacaatcccgaacacgcaggggacagcatcggtgtcacctgcaggacacaacagagtacagaaacaaaccctgagtgtctaagtcacggtcagggtagtgagtggggtgcacggggaagatgacctctgaaaaactatctagtcggatctcttccttccagcacacactgaaacaaatcccaatgaatcaaagatttaagtgtaaattagagaaataccagaagaaaatgtgggatgatcttttaaaacattggagtgaggaaagcctccggaaggaagacacgaagcccagagccacgaaggcaacactgatacagtgcacggcacagaggcgcaaatctcagtagggaaaagcaccatcagccaagtccctggacaggaaactgtggggcaccggccacacatcacacaggtggcgggctggctcccttttctacatcagagcacctaaacgccaagaagaaaaccatcaacaagccaaaaggaaaacagaagggtacaggcagccaccaggtaggaggaggcccccggacactcgtaggttcactggcctcatcacagaacgccagccatgagcctaagcctcaggctgtttgtagccatcctcctggccaagatcacgatggcagtgaagtctgagccaagaggcaccttctgcactgctgggaggagcaaacgcagatcaacccctctgattatattgatcaaacatgaagtataaatgcccagagccggctactgctgccggggtgcacttcgttcatcagccacggtgaagctgtaggacctcccgcccagtgctgggagacggaagaccagagctggctggacagcccccccaaaggcacagaatacacaatggcacgccctgcaccagaaacagcctcgggggccgatcctgttctgtgtacattccagtgcatgggcacatactacctatttaaaaaataagatcatgcaggctggatgatcacttgaggccaagagtttaagaccagcctgggcaacacagtgagaccctactctacagaaaatgaaaataaattaaaaaattagctgggcagggtagcaggcacctgtggtcccagctattccagaggatggcttgagcccagaattcgaggcagcagtgttgctaaccttgctatattttatgctgacaaatgaggcaatcctcatgaatgaagtttctgcattatgagcaccatgacatttttcctccagctttttttcctgagacaataaaggctagctgagaactgagggagaaatagacgttaactggcctccagggagcaagggagaacttccatgacaggacaagccacgctgagctgggcagagcagggagccagcacggagcagcacgaagttcaccctgggggacagtgatgagcaagagactgcagggtccctctggctgcctggagggtggcctggaggctgcctaggcgaggcccagctgaggggccctgggaagaaccaggacgggaagacaggggaggcagaaaggaggctgccccactgcacgctgtggctggcacagctcaaccccccacggttgctgacgcttttgctcctcaaacaaaaggtgtttcaattccaacacacaagcacggtgacgtgaaccgtctgcctcccttgctgccggtggaggggagatgggcctctccctggtaccatgtggaagtcccacaccagcccccgggcccacctcccctgttccctggccactccctaggccttgccgcctccctcagcaatgggaccagctacccacagggctgctctccccattcccacactggtgtatttgtggaatgaatgaatggtgactgatataaattctgagtgaaagatgactggtgtattgactaacatcatgttcaaaagttttggcagatactaattattttctaagactcacaaatcaataactgaccctttaaaagtctaatcaagaaagaaacatgattgtattttaaacagtaaatgatgacctgtctggtgtgctcggctcccctgtgcctggtgtgcccgcccagggaatctgtattccctccccagtgtgctcctgctcctgcccttggggtcctgcagaggcagatgctgtgtacaggaaaccacatggcagaccctcctgagagagcacagcctcgggtacagaggagcacggcagagagcagatgcaggcatggcttgggggcggtgtgggtgccagaccctctcctgggcctgcccaggctccaggacccactcaagtgagagttgctttagctgcaaataaaccatttccaaggaagggaaagaggttgcagtccatgctcttctctggtattgcaaagacaggaggcgtcaccttgccaattgctcccagcactgctgggggtgagagccacgcccccttcacacaatctcattttgtagctttctgctgacataggaattgtgctccagtaattcctcccagtgtgaggccacagcaagcgggggcctcaactcaagcacaggagcctggagagtagaggaagcagacacattacctggaggagccggaaagagaagcctctgggccacagccccggctgcccatgccacccctgcctaaggatcaggacagaaaactcatgacccagctcctcagcttcccgagggcacagacgggacctgctgggcacgtggaccctcctgagtccaggcactgagtccagcgattcgcaaaggacagtggaatctccagcaacacacacgtttttcaaaaactggctaccggaaaacgtccacccggaattcttgcaatcataagctctcctggtgaatttttacgattccatctggacaaaattcatgcaggtgacttgcagaggaacacagcagagccaggtgcgaggcagagccccctgagcaccatttttctttgctacgtggctcaacacacacggaaagtcgtctcctctctaacactcactttcaattatggatttcacaattcacagcactttcatgtgctctggagttgttctcgtcacgtggaaaatagtgcacagtcacagaaggcctgaccttgaaccctgagcagcactcacctaaaataaaattccttgcacaagccaccattccgaccccagctccaaggccagaacgcgggagggatgccaccacgtctgtaactcactggcctgcttgcagtggcttgcctgattctctggtgctgaacacgtgagtcaaacccacacttgtgatctaagccaaagaagaaaagagatccacaaaacacagcccacatcccaacaccaccttagagaacacggtccagtttacggtattgttgtgggattttttctttcgactgacccatctgagtcaaagaaatgctttcctggtgaaaaagagtttaaagtctgtttagatttgctgctaattggaaaagccgccatgtatatattggtgggtcaaacatgtaggttacgttacaaatgttaataccgtaagatgaaaagtttgcagttagttctgtaacacacggcccgggcccgttgttatctcatccaaaccgtaacctcaaacactctgactctttaagtcataactccaagtcagatcacgaaacacgtcactgcacaggcacccctatgggcccctcatccccgacacaatcccgctgcggcaaacatacctgaagaccacataagtcagtgtgcccctgacaacgcgacaaggtacgcagatggggacaagggactttacctgggtagagctgataagagccactgtgatgccacttaaccaaatacttccaaccatgcactgcaaaccacccctctgagtccataccagggtcagccggcagagcccgggcggccccgagcaaaggcctgcgtcccacacagggacattgctcctgagctcacactcccaggaggccaattattgcagtttctcccgcgatcccagcacacggctgacaaagacggctctgccctgcctgcacgcaggctcacggatgggaagccaacaggagacgtcgcacgaagccttgccgaagacgcatgcataattcacagcagcccctcagctgctgccgccacggagcctgaattattgaaggcgggccgagcacagctaggtgactgcacgtggcataaacactgcagatggaaccccggcctcccaacacgctactccacttcagcaatttgtgctttattaaacaagcagtggcaaaggaaaaaaaagtacttgtaggctttttgtatagtttttaactcttctttccacatgtaacttaaattaaaaaatttttagtcccataaatataaaacctatctttttataagcaggtgatcactcaaacagcgtgttatcaggaatatgtatttagttaggaaataagcaactataccaaactggaccacctgtgaaccataaggaacatttttacaaccaagcaaaatatgccaactcacagacatttctgaacaacctgtgggcatcctggaggcggcctgcccaccacatggggtggtccctttccgaggtggggtgccacacccacctctgttgctcctgcccccaggccgagcagggcctcatctctgagaggatctcctgggtcttggttcaagggttaggaaacatccgctaacaccacaggtgaggcccagcaaagttccctggagagggcgggtgacacacagtctccatttttctaggacactgcactctctgcagttaggacagaagcggcccccgacagcaactgcaggaatgggcatggccatcccactgacacttcattacacaaagctggttggtggcagggtttggctgaaggcgctgtttgttgaccccatctactgactcccggatggacactgccacacaagcagctctaacttgatggaagctccactacaaaggcatccaatcaagctccacattttccaagaaaaaagtcctggaaaggctgtagaaggcagagcttggcctcattcggcccacccgtccatcatgtgcttcttggcctccagtttctgaggcacaggaagcccttctcccccattcacagggcggcccaggcaggaggcgtgggtgcaggctctgagcccgccctggccggagttctgcactcctttctggccggtcacctcggcggggccccacagtcccgtgggcctcagtccccgtgtccatctgcggctggcaggggcttgcagggctgttgtgagggccaggagaatgaagatgggcaagtggccgaagcccagatgtaggcactatcagtgcagctaaatgtgcttatgggggagccgggacatacgagcaccgagatgccacaggaaacctttgttcacacccaaaccagccctctcctagacaatgtgtgccatctttttgggggggcaactttttcttttgaaatatttcaaacttgcagaaaaattataagaataataaaagggactcccatatccgtttgcccagattcaccaaatgtccgcattcttcctgcttgctgtatcatcccgtccctctcccttccgcccattctcccttcctctaaacacgttcacacctgcacacacgcaacctttttccagactatctgagattaagttggagacagcatgcctctttgcccctaaacacgtcagtgtagatttcctaagaaggtggacattctctcataaccaagtaccgacatcaaaatcaggaaatttaacaagccatcttccagcttcgtcaatcctgtcctttccagctcttttccccagagcagggtggaactcagggtggctgctgctgtgtgtctgcagtctccttccatctggaatgttccccagcctctctgtggttccaaccctgacagaggctggttatttttaagactgcccctcagtttgggcttggctgatgtttctttgtgactggctggaatgccctggaagccatgcggtgtccctctgggacctcctctgaggaggcacgtggtgtcagtttactgcagggtgggtgacgctggctctcatcatgtggctggggcaccagatttgtccgctgtcgtttctagggttccctggtgataataagcttcgtgcagaactaccccgaggctctgtaagtgtcttgcttcgcatcaagcctgagtccacaactttagcaccctctgatgatttcctgacgcactgttcagctgtattctgctctaagagcccccctcctgttactacaaagccatttatctgtgttagtgtggacttgctgggtttttattttagtccatggctcataccccatgaacacctttcttttttggaagctcagtccctccttcaggctggcacctgtatcctgctcatgtgtcctcatcatgccttaagcactgccttattttctggtgtgaaaaaaaataaaagcgaagctccagcttcatcctgtgtttttcccactccagcccaggaattagtctttgctccacagagcctgacaccctctacagaaaagaggtatagacaccaaaatctggacatgcaggtgctcactgctactggggtttccctgcctccagccccaccctggtggacagagctgggaaatgtggatgcacacgcacacactgctatgtctatctctccatccacacatccctctattgaaagccatcggttcatactgacgcctccaatgccaacccaacaccctgagcacatcctcacctcctcttccatctctgtaactccctgctggcagtggggaactggctcccatgagctctgatgtgtttgtccctgtgctcaagcctggcacaaacagaaagcagcttaagaacgactgacccacacccctgcacagacagacctacttactcgcccagcttaaaatcctaccacctactgtttaaagcctgcacttgatcaccaaagtgattttgtttccctttcgaaacagccaggcctcgtgaatacctaccatgcagtcactacagcggcaaaattcactttcacagaaaatccccatgtggagacttgtgcctcaggacaatccttctgtctctggctgccatgatgtgattgatcacatggccttgagcatgtctgtgccttggttttctcatggaagagaactaatctttgcaaggcttggggcaagtgtagacgaaggagcttacaccatatatctaaatgctggaaaattgtaacaaaggctaacacattgttaaataagctatatgccatctcgctaccctccaacaacctggaaggccaggtttaatttagaattctggaacctaagttctgcacagaagtgtggtagtgcagggagggctgccacagcccatagccccctccttactcccttagcttcaccccagcctcatactggggtgtgaaattttgtatccacattttgtcacatcaccccacgtcaatagccccctttgggtctcagagtatctatttcattccccagttatcaactggaagatgcttttcaaacttaaagcaatgaggcctttcttcccagagaaatcttacgggaatccctgtgaggggctggcttgcggaggaaggaggacatgtcgggcaagaacaggtagggtaggctcaggccccctctgctttaagcagcacaggctgcggaggccggcccagctctgcatctcaacaaaagcctgccacaacagcagagcctgctgagggttagaaaacagggatctggaatagcacctcctcagaaaagtgtttacatgctatcgatctcagtcaatcagcccattttacagatgaagctgctgaggtccaaaacattccatgacctgcctgggctgacatcagtgactatgctgggcccagactccacattctccatggtgaggtcccggtatccccagcagcactttctgggctgaccgtgagtctggcccccacagccagacctcacagccctgcagaggagctgccacgcctggcaggtctcacggacccctcgagatatagtgtacttcccgttacctcagagggccagaagaaatgtgggcccaaacaggagaaatctgaattctgggtctttcctggagtcagtactagaaacgtgtgatttataactattctggcagagcccagcaaaacaaactctctacgtctgaagtgacaccaagtccttctggagagtgaaatgccaacaggcgggggtgaaatgctgccagagcccatgaggccatgcgagtgagcagagcggctcctgcgaaggtcagtgtgggaagtgttaggcgatgtgcaaagacgagtgaattatgtcacttgtcactctgaatttttaggattctaggcttagagctaccaactatgaccataagtagttggtgaggtcacatctgaccacagggagccctcaggatgctccaagaaaagacacagaacatttttcaaagatcaaccctaactgacttcatttattatgcttacttgagctgaaaaaacttcacattactcatttagtggttaattcctttgtgaaactgacttacttcattttgatgaataaaatatttatactttgtaaagacattcttcttctattcttgtgccagtggccacacaggaagttcagaccttctggttgtggcttggccccaccagaggacaccacccaacgcagaggacgccacccaacgcagaggacgccacccaatgcagaagcccaggggccccaaatgctgacctcatgaggaagactcaaaagtggtcctaaacccttccctcaagccaaggtggggccacccacacagaaaactgaagacacagtcctggggacctgtgcttccactgaaagagtccagggatagagaggacgaaagggcaccctacccagcaggactgaggccagaggaccaggcttcagggaaggaggaagggcctgagtgtgtaaaagcataaaggatttgtgacatttagaggccaccccataagccaaaaagaggtaacacaagacacggaaaaaaggcctactctacacatcaggggcagatggtggatgctctcagccatggtggccatataaatggtatttgctgggactgtgatgacttcacataattttaataataaatataatatgttagatgtaaaactaagcataatgcaatgtttgtaccttttatataacttctgatatcaaacaatcaaacttaaaaagtcatttgtcctaaaccgggcttccaaaaatctggtcaccatgctggtcccatgtccactggcccagggaggtaggcagcgctcacgggctccagggcctgctgcctgtggtctggccccttcccaggggtggagctggggctcagggggccacctctggagactgcttctccttgctgactgtggagaggctctgcaaagccctggacttttacgcagcaagagacgaggctaaggcagggctctcctccatggggaacccagccattctgcccattctcttcctaaaaccgggtgggcaagtttaaggtgagcatgcggtaaatgaggccaccgcctccttctcacgattcacaggtgctgacgggatgtctgctctatggcaagctgtattctaggaggtggatcctcagcctggtgttacctagtccacagtgtgccggttcacggcgtggttccagagtcacactgttttggatctgactcagagatccgctcctacctcactgggcaagacactccccccgctgtaaaaccgcagtaaaaaccgtgctcggacttcacagggacagcgtgagaactcccctcctcaccaagtaacttacgagttacttaactttcctataaagctgggataataactatgcgtctatgctgacatgaaaggaacactgtgacaaacagtgcgaggcacatcctaggcatccaataacatcgtctgactaagtggattgcttgtcccaagtaacagctaatgagagactacaggctgaaagggatataaactgacattataatgcataattcataaaatattttcttccttgaaaaaatgtaaatataaatctaaaatccctattgggcttatcacctaaaattctggtcctataccccctccccaaagataatccatcttattaatttggtgttggtctgtcgaatttttaaagcatttttacccaacaatacatatgctcccatggaaatcatgtgttttgcttaggaaagccgccagggttgatctcactgaactctgccaggtttaaaagttggacctggccatgggctatgctttcggttttgtataatagttagataataatattatttgtaaatgatgattatcttttttcttcccaagtttaatatttttttcttgccatgtagtgctggccagaatctcaatactatgttaaatcagttgctgagatagagaacatccttgcctattcctggctctaataggaatttttctaatatatatactattactaatagtataattattattatatgtattctattaagtataactttgtaaaaaaggaatgagtgctttttctattcattatcatatatattctattactaattattaatactaatgagtattactaatgagtattactaatactaataagcaattagtattactaatactaatactaattctaatagtaatactagctagtagttagtattactaaaactaatactattactaatagaatatataatatataataattaatagagtacattcatgtattctattaagtataactttttaaaaaaggaatgagtgctttttatcagtaattctattagatgctcctttggcctccagtgtggtaataatatgattttcgtcctttaatctattaatgtaacacaatccgttgttttgttcaccaatgtatccctagttcctagaagagttttttgaagaaaagtgagagccccacaaaaatcactgttgaatgaatggtgggatgaatggaaaattccctaagggtgaactatctttgcatttcttgtgtaaaccaaacttcacaaggatgcattaaaaaatgctactggatttgatttgctaattattttatttacaaacttctatatttactcataagtgaaactggccaataattcaattttcctgtgccatctttctccaatattggtatcaggaatatgccagtcttgcaaactgaggtgagaagcttcccatcttctatgccctgtgtaaagacaatattaagttggaaatgtttgttgcccccccttgtggaagatcattcaagccctgtgtactgacgtcaggcaaaccatgtgttatgctttggccaatgaatgtgaaacagtatggctgagagccatgacctgattctgccctgccgtcttttccctcggccacaaggcctgcagtgccccatttaggaagcgctccaatagcctggctcctggaggaaaacacttagaacaaaaacaaagccaaactgcagtaggcatgtaatgtagtgtaagaaatgaacatctgctttgttaaacccaccaggatttttggtgttatttgttattgcaatattacttagcctaagctgactgatatactcatctgtatattggtttgggcatggtgcctatgggggttttgatctttgacttccaaatcatttttgcctatgttgatttatctaatcagtttctacttcttcttaggccaactttgatcatttatattttcctaaagattgtccggttaatcaaatgtacagtataaagttgttaatggaattgtcctatagtgttacttcttagtctctaactgtacttaggacctgtctttcattcttgatgttatctttgtcctctctaaattttctttttttgtagagatggtgttttgtccagctggtctgaaattcctgggcccaagtgatcctcctgcatcagcctcccaaagtgctgagattacaggcataagccactgtgcctggcctccctctttttcttgattatacttttgttcatacttttagttgtatactgtttggttttttctattttgataatttctgcatttatcttcatttccttaatttgcatttccttttttccgtacttgcttctgttgaaaacttatttcctatattttcaaacttttttctaatatatacatttaatgctacaattttttcactgaaaatcactttgattatattctactggtgatgatgtgtagtatagaaccataaatggttctaaactgtatgataactcccattttaatttcttccttgacccatggattatttagaagtatggttttaaactttaaaatgtatgaattcttttttgttatcattttatgatcgacttctattcaaatacactgctgtcaggagctattctctgtatgctataatttttttaaatttgtagcaactgcatgtgtggcatattgtatgccacaactttagtaaatgttccacgtactttagaaaaaaagtgtattttccatttggtacaaagctctctatgtgtctgttagatttaatttgctcatttttccattcacatactttgtaatcttactatttttttttttcagcttgatctcttggtttctgaaaaaggtgtgtaataattccccctcggagtacttacccatgttgataccgtgccatttacttctgttctgcaaatctcatgctacttttggtgcacactgtcttttttgttctttttattgctttttcactttgtctgatattaatattgttatgccacttctcttttttcttaatattgcttgttatatcctctcatttagttgttttcaaacttttgtcacttattgttgtttgtttgtttgttttcagaaggagtcaaactatattgcccaggctggtctcaaacttttggcctcaagtgagcctcctgcctcagcttcccaagcattccctataatccacagctaggattataggtgtgcaccaccgtgcctggttcaacatcgcttattttaaaattgggtttttaacaatcaaagtggagagtttttctcctctgatgctctttctcttgttgatcttgtaagcttcttcaggacctcctggcttattttctctacccagtccctctaaataattttattcacttccagtggtcaattatattgaaaatgcaattaaaatgccattacaaataatggcagttatcatttatataactccttataatgtaccaggtattgtccgatgtacttcacatatattaaatcatttacttcctgtaagaagtctgtaagtaatgggtcctactattattccattttacagatgagagaaatgagacccacagctaggaagtagcagaattaggatgtaaacctaaataatttggctccagaggccatactcttaattgttctatgtcctattgcctctcaaaccacatcttcagcatcttctggtttcccatgtgtcttatgggtttgagactcgccttttctgcatgatctataattactcaagtttaccaagccaatgagtttcattgaaacgctgatgactcccaaatttctattttcaagcccaaccacttttctgcattctgtactcatttatccaactgtctacacaatatctccagtagattttgaataaacatctcaaaaatcccatgtccaaagcagaattcttggttatcacccccctatctgctcctcccaccctagtcttccccatctctgcaaacaccctcatcctccgagctgcctgaggcaaaaccctgaggttagtcttgggacccctctcacgtcgttccactgctcctcccatggacatgtgcacacacgactactctctcttgggttcctcgcgaccccctggctgccatctcagctttttcctggttcttcctgtcttcccaaactcatatgagggttaatcctcacccatctgtcaggtctcagctctgctcggccatcctgaccacagggtgggctctggcccggccacgcacttgcacagctccttcttcttctatcgcagccagtgtggcatcccaccacagcccacctcggcacccagaggcacacaggggcttcccactggcttctctgatgcaaccagtcccttttttctcaagtccttgcaaggtcttgtgtgtcccaggctgctccctcaccttctttcgagcaagagtctatttgagggtgatgcattagcctgaaatcatctccattaatgctggtgttagatacttatagaggtcattcatccagaagagatggttttttaaaaggcaaaccaagccagatttagtatttattcctgggaggaatggtctcaagactttgagagcaagaatgagtaactacatattgaagatcacatatgtataattacagcaattaaaaaaaaaaaaccccaattgtccaaatgtcaatggctgcatgtggcttgtgataacatttccaggaaaagcatcaacacagattccagaaatgctatgtctcaaccagcttggacaaaagtgaagatgactctggaaagctgccagtgacttgaaaattgcctccaaaatatataaggaaatgcaagggccaggaataaccaaggcaatcttaaagacaagcaaaatgaagactatagcactagatatccaaatgccagggacgagaattacgacatgaagtcctgatccaatgatagacaaacagaccaatggaacagaatacagaggccagaaacagacccacaaatatatgattacctgatacaggtgttgcttcaagttattgggaaggattgtcttttcattacatggagctgggacaactgaataccatgtagaaaaaatgaatcttacccctacctcacaccatagacaaaaataccaattccagatgaatcagagatttaaatattgaagataaaacaaaacagatttactttcatggtcttgggaagggcaaagcctgctctaaagggacataagcattaccctaaggggaaaaatgataaactggattatattaagaactttcagtcatcacaagataccactaagagaatgaacaggtaaggtatagaaaggcttaactacatacataaatctatcacaaacacataaatccaaaacacaaggtatatctaatacagccagccctccgcacccacagttctgcatccacagattcaaccaactgtggatggaaaatatttgggaaaatatttggaaaaaaaattaatggaaaaaaaataacaatacaacaaaaaatacaaataaaaacaatatagtataacaactgtttacataccatttacattgtattagctgttatcagtaatctagaaatgatttaaagtacccaggaaggtatgggtaggttatatgcaaacgctacaccattttatatcagggactcaagtatctgcagattttggtatcctcaaggggtcttggaaccaattccctagagacactaagggaaaactatacgtaaatccaccataaaatcatttccagaatatatttttaaaatattctataaatcaataaggaaaggcagataacctaacagaaaaataagcaaaagtcttgaacaagcacttcacaaaataagatattcaaagggccaaaaatatatgaaaaggtgatcaattcatagtcatcaggggactgagaactaaaactattaatacaattaaagccctatgtatgtggctacagggaaagtgttgagaggatgttgaacacctagaattcttatatactgctagtcaatgtggacactgtaaaaatcatttggaaattggcagtatttactataggtgaatatatacaaacccccagcctatcagagcagaaatgtatgcagatgcccacccaaaagacctgtacaagcatgttatatggcaccatctgtaacggccaaaagtcagaaccaacacgatgtcatcaagagaagaatggaggaacgatgccatatttgcaccatggacagtccacagctaggagagtaaacagctcctgatagactcacaggagcaaaatgcaccatcctatgttaaataaaggaagctagacactaaacagcatacgctgcgttgagtctttttttttttttttagatggactctcactctgttacccaggctggagtgcagtggcgcaaactctgctcactgcaacctctgcctactataaccttcacctcccaggttcaagagattctcctgcctcagctaccctagtagctgggattacaggcatgcgccaccacatccagctaatgtttttttttgttttgttttgtttttttgtatttttggtagagacggggttttgccatattggccaggctggtcttgaactcttggcctcaaggaatccacctgtctcggcctcccaaagtgctgggattacagatgtgaaccactgtgcccagtcagtcttcttttttttttaagtttgaaaacaggcaacagccgtcgggtgagaggtcccttccggagctggtgactgagggcctgcaggggcgcttgggctgctggtaatgttctgtctcttggtctgagtgctgataacacacatgtgttcattctgtgaaaatctctcaaattgcttattgatcatgtatgtacctttcagcgtgtaagctattcttcaataaaaagttttcattacttgaaaaacaattgcaacaaaaatgcatctgaagtgtttaaatagtgtcacgaaatgtgagcagaatagagccacctttctacatcagtatcatttaatataaaatgcaattcctaatagagtattctcattagatatttgttacctacattcctttctagatttgttatttacatttcacatattcggctgagcatggtagctcacgcctgtaatcccaccactttgggaggccaaggtgggtctatcacctgaggtcaggagttcgagaccagcctgggcaacatggtgaaacaccatctctactaaaaatacaaaaattagccaggcgtggtggtgtacatctgcaataccagctacttgagagactgaggcacaagaatcacttgaacccaagaggcagaggttgtagtgagtcaagattgcaccactgtactctagcctgggtgacagagcgagactctgtctcaaaaaagaaaaaaaaaaaagatgtgctgaaggagcagacggatgaaatgccgtggaagggcaccacgttcagagagatgccggcagaagggtcagtcgcaggtgctctgagggccgggcagaggcttggtctctgcacttcacctagggagccagccaggccaagtccaacctgggctgggcagcttcctccccaaattccagccatttccccatagacccagcatggtgctggcctcagatgctccagggacgggcctggggagaggagaacctgctctttctgggttgtgaggcagcttttgggaaatcagtgaagctctttgtacaaggtgccgtcatgacctgagttttgttctgaactttacagaccacatcccacaagtaaggtgaaaaaaattatatcacagaactctatctgccgtgggagagcacctgggacaggccttcccctcctgccagacagtagaatagtagacaaaatacgcagagcatcagaacctgcgggaaaagacagaaaaaagaaaagcaaaatatgcgaagcaacagttcccaaaattggaccacagtcaccagaaggggtgtaattcctgatgaaaaaattaataaggtgagccctgtgaccacccagagctgtcagcccagaggcactccatgaaccacagcacaaggtggggcccaggtagaaccaccgtccagagctgaggagacaggtcagaatcggggaaggccagggtggctggagctgcaggtgcaggagagacctagcagggaaagtgcccagggacctcacaggagcctccacctgtggctgagttctaagctgtgcatgcacagccgagaccccacgaggcaggcaaagatcagccgggggctgcggcgggaacagctgccagaactcacacagggtcagggggttcccgagttccagccagttctgggtgaatccccagcttttagaggagtccccaaatgtagctttacaaacctctgtattttttaaaggaaggcaacaaaattcagcactcagtcaagaactgccagacaaatgaatactgagaaaaatgtaacccataaccaggagaaaagtcagtcaataaaggaatcccagaaagacagagatgatagcactggcatctaagggctttacatgtcttataaatatacaaacattttggggttttttgtttttgttttgagacagtctcactctgcccccaggctggagtgcagtggcaccatctcagctcactacaacctctgcctcctgagttcaagagattctcctgcctcagcctcccgagtagctgggattacaggcatctgccaccatgcccagctatttttatatttttattagacacggggtttcaccatgttggccggggtggtcttgaactcctgacctcagctgatccgcccacctcagcctcccaaagtgctgggattacaggcatgaaccactgcacccagccaacatttttggggttttaaagcaaagcgtgaagagaatcagtagaaagaaatgaaaaaaatagaaggaactgctaaagatgaaaacacagtctctgaaagacaggctgatcggcaggaattc

SEQ ID NO: 44 - DNA, 294 bp, Homo sapiens
ccttgaacaggtggaggccagcctctcctgactgtcatccctattggcaggttaccccaaaggccaccccgaagcagggagctttgaggctgacctgaagcacttgaaggagaaggtgtctgcgggagccgatttcatcatcacgcagcttttctttgaggctgacacattcttccgctttgtgaaggcatgcaccgacatgggcatcacttgccccatcgtccccgggatctttcccatccaggtgaggggcccaggagagcccataagctccctccaccccactctcaccgc

SEQ ID NO: 45 - DNA, 191395 bp, Homo sapiens
gaattctaaaaacagcaatagaaaagtgtctagtcacttataagagaactctcatcagactaagagtggatttctcagcagaaaccttacaggccagagagaatgggataatacatttaaagtcctgaaagaaaaaacctgctagccaaggatattataccaacaacgttattcttcatacatgaaggagaactgacgtctttcccaaacaaacaagctgagggaattcatcgccactaaattggcactacagaaactctttagtcctatgcctggaagcgaaagaataatatctaccatcatttaaaatatatatatatatataaaccactggtcaagcaaacacacaagagataaaacacaaatattaccaagacaaaaaaaccaccaaacaacaatgacaaacaatgagagaaagaaacaaaagataagtatagaaccagaaatcaattaataaaatgagaggaatatgccctcacttatcaataataaccttgaatgtaaataaattaaacctgccacttaaaagatacagtctggctgaatgaattttaaaaatgacccaactatatgctacctacaagaatctcatctcacctgtaaagacacatatagacagaaagtaagggaatgtaaaataatattccatgcaaacagaaaccaaaagtgagcaggagtagctatacctatatcagataaaacagacttagaccaaatggacctaacagacatttaaagaacatttcatacaaccactacagaatacacattcttctcatcagcacacagaacattgtccagaagagatcatatgttaggacacaaaacaagtctcaacaaatatttaaaattataaatcatatcaattatcttttcagaccacaatcaataaaactggaagtcactaacaaaagaaactttggaaagtgtacaaatacatggaaattaaataacatgtcctgggagaaattcaggatgaaatttaaaaattaaataacctgctcaaggaagaaattaagaaggaaatcaaaaaatttattgaaacaaatgaaaataaaaacacaacataccaaaacctatgcgatacagcaaaaaacagtgctaagaggaaggttaaagcaataaacacctacatccaaaaagtagaaatatttcttaaaaaatctaaccatgcacctaaagaaactagaaaagcaagaacaaaccaaaaccaaaattagtagacggaataaaataaagatcagagcagaattaaacaaaatagagacaaataaaataatacgaagggtgaacaaaaaagtttgtgttttgaaaagataacatcaataagccacttgctggagtaatcaagaactcttacacactattagtgaaaatgtaaattagtatagccactatggaaaacaatgtggaatttctcaaaaatctaaaaataaaactaccatacactccagccatttcactgctgggtatttatcctaaagaaaagaaatcagtataacaaagagatacaagcactccaatgtttactgcagcactattcacaataacatatatatgaaaccaaactaaatgttcagcaatggatggatgaagaaaatgtgtataatgtatatatatatatatacacaatatgtgtgtgtatatatatatgtatatatgtatatgtgtgtgtgtatatatatacacacacacacaatggaatactattcagacataagaagaataaaatcatgtcatctgcagcaacatggatggaactggaagtcattatgttaagtattaagtttaaaaagccaggcatagaaagacaaacactcatgttctcactcacatgtgggagctaaaaaagttgatttcacggaggtagagagtagaatgatagataccagaggccgggaagagtaggtgagtgggaagggggatgaagagaggttggttaatgggtgcaaaacatacagttagatagaagatataacttctaatgtttgatagtgaactagaatgactagaaatgacaatgacatatggcatgtaacaaagtagctacaagagaggacttgaaatgttcccaagtgatagaaatgataaatattcaagatgatggatatcccaaataccctgacttgatcattacacattttatgcatgaaacaaaatatcacattactccataaatatgtaaaatattatggatcaataaaaaataatgtatttgaaaaactaacttctttaaaaaataaaactgaacccctacattacacataaaaaattgatgaaaactaaatgtgtaagaggaaaaaagctttatattaaagttaatagaaatacaggatttatatgcatatatatatttataaaccatgacttggtaaaatttcaaaagcaaaaataataaggcatatgcatgataaatttggttgtatcaaaattaaagatttctattcaaagacatatactatggatggttctcatagatgaaaaaaatgagagaagattcttatatgtcttggcaaaaaagtgaataatattgagaaaatacaatgtctaaatgtctagacatcgttaattgataggaaaatgacagtaactgcaatagaacaatggtcaaaaggtctgaataagaaactgcaaacttaggaagtatggtcagctctctgtacctatgggttctacatcagtgattcaaccaactgaggatggaaaatattcacatataaaaatgaatggttgtgtctgtactaaacatgcacagactttttttcttgtcattattccctaaacaatacagtataatcaatatttacatagagtttacattgtattaggtattatatgtaatctagggataatttaaatcacatgggagcatatgcatatgttatatgcaaatactacaccattttataacagggacttgagcatctgcatattttggtatttgcggaaggttctggatccaatctcccatggacaccaaaagactaactgtatatgaatacataaagagacactcaaacttactagaaatcagagacatgcaaatcaaagcaaagcaacatcacttgacacctattggattaacaaaaattggaaagatggataaccgatggggtgtggagacataggggccctcaagcgctgctagtgggattgtaaactgcagcagaccctgtggagagcatctggtacatttgactaaacttggtataatcccacctgcagtgtgattcagcaattccactactagttagatatgccaataaatttctcatgcagacttctaagacgacatgtgtaatatttattacagcattatttggggaagtctggtgttggaggtgagatttggcaagttcattgcaaggagaatggatagataaaggttgatggatgcccttcatagggtactacagagtaaaaggaagcaatggactagatgtacatgtagcaacatggatgaatcttataaacagaatggatgaatcttataaaataatgccaagtaacaatatttttaaaaacataatatcttatatgtaaactaatagcatttacataagttgaaaatgtacagacataaaaaataatatgcattttccaaaagcacttataaacaaaaagacatgagaatagatgcttatgttgagaaggaagaatacaaaatgggtactggtgattaaatggaatgaattaagagtattgattgaatgaatgaagagcggggattttactggatgaatgatgattcaggtatcattactgtaccttctgcatttgagcatagaaaataggaacagaaaatttgaatggaaagcaaggaattatatgagctcttcctccaaaatttacatcatataagttgaaaactgggtgaagtataagcagggagcatttttgcaatgtttaaagtcctaattcataattttgaattgtgtttttcttaaatggctccttaaatataagactatattttagtgaagccaataatgttttcatattcctattgatgtgatctacaaaggcaaaaaacaattttaaagactaatttctaatcttactttaattcctaaactagattttcaatggatactgtctttccatgacattaattgctacaaaagaatacagaaatttccccacaaataaataaatcaaaaattatttttgactttagctatttttacagacttttgtccagtttgttgtattttatataaattcatttcttacacaaatttgtacataaaagaaaaaataagaaattctccatatttgacactgatcccttctggttgattttttaatttcttgatgcaactagcaatggtgcagtgcaaccatagctcactgcagcctcaaattcccgggctcaagccatcctcctacttcagcatcttaaatatctgggactacaggtgtgtaccaccatacctgatgtatatatatgtatacatatatatatataaaatatgtatagtatatatattatatatattgcattatatatatagcattatatatatatattatatatagcattatatataattctatattatatatagcattatatataatgctatattgtatatagcattatatataatgtattctatattgtatatagcattatatataatgtattctatattgtatatagcattatatataatgtattctatattgtatatagcattatatataatgtattctatattgtatatagcattatatataatgtattctatattgtatatagcattatatataatgtattctatattgtatatagcattatatataatgtattctatattgtatatagcattatatataatgtattctatattgtatatagcattatatataatgtattctatattgtatatagcattatatataatgtattctatattgtatatagcattatatataatgtattctatattgtatatagcattatatataatgtattctatattgtatatagcattatatataatgtattctatattatatatatagcattatatataatgtattctatattatatatagcattatatataatgtattctgtattatatatagcattatatataatgtattctgtattatatatataggattatatataatgtattatatattatatataacattatataaaatgtattatatattttatatatatagcattatatataatgtattacatattatatatagcattatataaaatgtattacatattatatatatatagcattatatataatgtattacatattatatatagcattatatataatgtattacatattatatatatagcattatatataatgtattacatattatatatatagcattatatataatgtattacatattatatatatagcattatatataatgtattacatattatatatatagcattatatataatgtattacatattatatatatagcattatatataatgtattacatattatatatatagcattatatataatgtattacatattatatatatagcattatatataatgtattacatattatatatatagcattatatataatgtattacatattatatatatagcattatatataatgtattacatattatatatatagcattatatataatgtattacatattatatatatagcattatatataatgtattacatattatatatatagcattatatataatgtattatatattatatatatagcattatatataatgtattatattatatatagtattatataatgtattatatattatatatagtattatatacaatatattatatatagtattatatataatgtattatatatagtattatatataatgtattttatatataatattatatgtatttgtgtatatatatatttgtacagacaagatttggctatgttttctgggctcatctcaaattcctggcatcaagaaaaccccccacctcaatttcccaaattgctgagattagaggtaccagccacaatacttggctttgagcacatttctttatttgaggtaaatctttcccttgaaaatatttgatttccaacaagtcaatttcctgatgatttttttccaggaatttatttttcactgtttcattcacatttaatgctgtttttaaaaattctagttattttcagccattcttatgaaagatgaattgccacaggggttcaccaaaaagaaatggaatgacatttatcaaagataatcacagtcattaaaattggagatactgattttacagaggatgatgactttagtccttaaacatgactatttttaatactgacatataggcattagactataggaaaaaaacatttgtcaaagagttttgaaactgcaataattctgctttcttcaatgaatatcttggcagaatcctctgggaacaaaatgtctaagagtacagattctatgacaaggacaaattctcacacatactctgattattctaacaaaataatcagagagagaagaaaaagaaacaaatgtctatttcttccaagcttcagttcagatctatattccatgattctgactaccattgcggggtaggggccagagtgagggtgtttaatcaagtttgataatgaagcagttgtcactacataaagtgtaaaataatatataaaatattagaattcagattctaaaggtaaatcaaatatgcattgcctgattatataatgagaccttttccctccctctttctctccctacctgccccttttcccgtcttccttttcttcataacacttgcagaatgatatcgtaggaaaagaccaaaatattatccttagatgaacctgaacatattgtgtgactgtgaggaagtcaccaaccttcatggatttaaataacacagctttggtatatagtgacatgacaaaattagactaaaatttcttctaaataggcaatgggtacttttgtcaccctttggaatctgaaatacaaaataaaaagcaggaagacttagccagagcagtcaggcaagagaaagaaataaaaggcattcaaataagaaaaaaaaaaaaggaagtcaaattatctctattcaaggatgatattattctatccccagaaaaccccaaagacactgccaaaagtctcctgtaactaaactttagtaaagtttcaggatacaaaatcaatgaacaaaaatcagtagtatttctatacaccaataacattcaagctgagaataaaatcaagaatgcaataccattaaaagagctgcaaaaaaaaaaaaaaaagaaatacctagaaatacatctaaccaaggaggtgaaacatctctacaggaaccacaaaacactgctgaaagaaatcacagatgatacaaataaaaaaaaatttcatgctcatggtttagaagaatcaatattgtaaaaatggccaatactgccgaaagcaatctgaagattcaatgttattccagtcacactacccatgtcacttttcacagaactggaagaagctattgtaaaattcatatgaaaccaaaaaagaaccccaaaatgcaaagcaatgctaaacaaaaagaacaagctgaaggcatcattttacccatcttcaaactgtactataaggctacagtaaccaaaacagcatggtactggtacgaaaaacaggcacataggacaatggaacagaacagagaacccagaaataaaggtgcacacctacagccatctgatctttgacaaagtcaacaacaacaagcaatggagaaaggactccctaatcaataaatggtgctgggacagctagctggcctatgcagaagaatgaaatgactcctaccttacaccatacacaaaaattaactcaagatggattaaatatttaaacatgaaatctcaaactatcgcaccactgcactccagactgggcgacagagcgatactccgtctcaaaaaaaaaaaaaaaaaaaaaaaattcccagaagaaaacgtagtaaacacccttctggacgttggctttgggaattaatttatgactaagtcctcaaaagcaactgaaacaaaaacaaatattaacaagtgaaacctaattaactaaagagcttcttcaccacaaaagaaactatcaacagagaaaagagacaacgtacagagtggcagaaaatattcacaaagtattcatccagcaaaggcctaatatccagaatttatcaggaacttaaacaattcaacaaggaaaaccaatgccattaaaaagtcagcaaaaaacctgaacagatgcttctcaacagaagacacacaaggggccaaaaaactatgaaaaaatgttcaacatcactagtcatcagagaaaagcaaatcaaaactataatgagattacatctcacagcagtcagaatggctattactaaaaagtcaaaaaacaatagatgctggtgagactgcagagaaaaggggaaaaggaaggcttatacaccgttgaagagaatgtaaattagtctagccattgtggaaagcagtttagagatttctcacaggagttagaactattattcaaaccagaaatcccattactgggtatatatttaaaagaaaataaattttctaccataaagacaaacatgcacttgtatgttcattgcagcactattcacaatagcaaagacatggaatcaacctaggtgcccgtcagtggtggattggataaagaaaatgttgtgtgtatatatcatggaatactatgcacccataaaaaagaatgagatcatatcctttgcggtaacatggatgcagctggaggccattatcctaagcaaattaacagaggaacaggaaactaaataccacatgttcttacttataagtgggagctaaacattgggtactcatagacataaagatggcaacaatagacactggaactactagatggggaagagagggctgaaaaacaatctattgagtactatgctcagtacctgggtgataaaatcaattgtactccaagtctcagcatcacacaatatactcatgtaatgaccctgcacatgtacacctaaaatctaaaataaaagttgaaattattttttaaaattaaaattaaaataataaaataaaattagaataattattttcacttctagttcctccattaactttttgtatttaagaactggttgtttatggttgggcatggtggctcacagctgtgatcccagcactttgggaggccaaggtgggtggatcacctaaggtcaagaattcaagaccagcctggccaacatggtgaaacgctgtctctactaaaaatacaaaaattacccaggcatagtggcacatgcctgtgattccagctactcaggaggctgaggcagaagaatcacttgaacctgggaggcggagtttgcagtgagctgagattgcatcaccgtactctatcctgggcaagagagcgagactccatctcaaacaaacaaacaaacaaacaaaaaagaactggttgtttcttatctttagtgtgatcggaaagttaagagggaaattctggatcaccattcccgaaacaaaagaataactctagaaataaagttctagtcattcggctgatgtcagttggtgaaattgtacagcaagaagattttactggcattctttaacactgattgcatactctatactctaagaaattaaaactagggaacctgaggtcatttatctggacaaagggaaaaaaaaagtccaagttattcgacttagaacaggatgaatcctgacattaaaaacttcattaacaactcacactatcacacgcttttgtgtactgagacatgtaacactaaggcaaatcaattggaacggggatatgtaaacaggggtatggccacttgggtctctgaggacaaaacagcatcatgttataagagtgctcatggctcacgcctgtagtcccagcacttggagaggccgaggcgggcggatcacgaggtcaggagatcgagaccatcctggctagcatggggaaaccccgtctctattaaaaatacaaaaaaaaaaaaaatagccgggtatggtagcaggggcctgtagtcccagctactcaggaggctgaggcaggagaatggcgtgaacctgggaggcagagcttgcagtgagccgagatcgcgccactgcactccagcctggggcgacagagcgagactccgtctcaaaaaaaaaaaaaaaaaaaaaaaaaaagagtgctcttgttggaaaagagctgtttgacctgtgtggggactgaatacttacagtgtatgagggttcacagccctctccctatagccacctatgattgaacaagcaatggttggtgttaggcatcttccagacatttatattgacttccctttacaaaaaatatacgaaaggtacatgcatagatttttaaaggaaaagcaatcaaagagattgtgtgaaggggaaatgggctttgttgatatgtgggatgtacaagagggcatggagggagaggtgctcaaggaaccaaggtggtgaaggctgtagatgagagacattgtgtataaggcaggagaataaaaggcccctggaggtttgaaggtaccagagaataagaaggatccagcctggttagtacaattggctgtgagctaagcaattgaagtctcttacatgttgtgagtaaaagtcttaattttggtttcaaccatgcctttcccaatattatagctccaaaactagaccatatacattccagtttgtaggtattacacatggcattaattatttgaaaagggataatgtatttaaaatggtgacatcaaagcaaaggactttcagagagtggctttaagtagcaccttctctcccaacaaccccatatacttgctcatctggtcccaccctactccaacaattaaatgccaaacaaaggtatatgatcccaaagtgtcttccaaactccccaactcagtactgtgacacttcaatcctttatatacatggtggggaaattttaaagctttagaactcccattgcagagaggagaggaaagacaccttactctgcatttggttaaaggtagctcttttataacattgagcttcaacatttgatcatggccttacgtattagtccattctcacgctgctataaagaactgcctgagactgtgtaatttataaaggaaagaggtttaattgactcacagtttcacagggatggagaggcctcaggaaacttacaatcatggtggaaggggaagaaaacacgtcctatttcacatgacggcgggaaggagaagtgccgagtaaagcggagaaagccccttataaaaccatcagatctcatgagaactcactattatgagaacagcatgagggtaaccgcccccatgattcaaccacctcccaccaggtctctctcacaacatgtggggattatcaattcaagatgagatttgggtggggacacagtcaaaccatatcggcctatattattttgtttcctgtgttttctcttcacccttttctcacttgtgtgaatttttggttcttccccaccaggactaaaactgtgctctataaactgtaaatactcagccttataaacattaatgatgacacagaaaagagaggtgtcgagtgaataattggatgctgaaggttaaccatttagtgagttgaaaacatcgacaattggccactccataagaaagtatttccttaaagcttattttattagcgagggagactatatgcattatgttattttcttttctcaaggtctgtatttatcccaaaacattcagtgttaaaactatatcaatgctagagttcaaatctcagctctacaagatgttgactttggggaaatcacttaattggctcctcagctgtcaaaggagataaggacagtcacctccttgacgtattattgcaagaattttgtgagatgatatttctctagcagtgttcttaactaggtcaaacttgaaatttgaataaatctggcatgtacagttaagtatttattatgggcaaggatttactccagagagagaagagctgaagaataccatgggaaataaatttgaattgtttcatgatggtagtgcccagatttcaccataatgtatgagaacagacagaaacataggacaaatttgaagtttttctgcaggacaacagggaaggaagtttggcaccagaaatctgggggaataggtgctaaaaatgtgtaaactagaagagttgtctcagaacttttgggatccatcagttctgctgcaatgacactttcaataaatgaaacactgtgcaacagaggggtggattctttccttaccagtgcaaccaaagtgggcagctatgagaacgggatcatgagagcctgggaaacaacccctaagaattctcatagataatagaatagaagaaaccttgaaaatgagcctgtgttcccataggcacatgagatagaaaaggcatatatagtaaggtaacctcatttgtatgttcacagtcagtgaaggactggatgaatacaggtctcaagtgaaatacactaagcacaaagcctggtgtatagtaggtcctcaataataaatgtttgttctctttcccttgaaagacagacctcttaattaagacatcctcgaaagagatttctcaactttttcattagcatcctctggataccttcactctcattaccttcagcactatgattagcgtcaaaaagaattcttcatgtaaagagtctgtaattaggataccagggagagctcagcatctgaaaaggactgcagcacctgcctattgtctcagttgctttttatctctctaggcctgcaatatcaaaagcacccagtacaaattaaagatgcaaaaacctggctggtctcaaagttggttcatttcccgttagaaatactggctgtgcatttttcttgaaattagaacttcagaacagcacatccagtaattagtgcatgattttcttttcacttgaatgttttctgcttcttttttactattgcagcaattgggtatttgagagagaaaaataatgtctcaacgcatgcttcatttcccaaagcagggggcagagtccagattcctgatgaaagcttcaaccttttaattcagatgaagtgaagctcaatttattttgttggaaagtttgaactggtctgtgaggcagttcaacagttcaggcttactgtaattaactgtcaaataagagtccgggactaagcagagaaacgcaagtgggtcagcatcagaagggtttaaattctgatgaaattttacaagaagaatggcctttcgtggaaacattcatcccagtcaatagttcactgtataagcagcagcaagtgtaggtggttatcaaaaacacagcttgaactcccattaggcttccagtgccctccctttctggttatcactgatgctcctttactagaaacattaattcagggtttctggtaaccttgcctctgataaactcttctactggagcttgtccgcataaggagagcgagcctttgaggctgcggaagtttgaggggaatacctagaaaactcctattgctattatgctaacccacagactgcattgaatggcaaaatgcgtaagaaaaatgtccttggccgaatgcagtggctgacacctgtaatcccagcactttgggaggcctagatagacagatcacttgaggacaggagttcgagaccagcctggccaacatggtgaaacccatctctactaaaaatacaaaaaattagccaggcatggtggcacatgcctgcaatgctagctactcgggaggctgaggcacaagaattgcttgaaccagcgggggtggaggttgcattgagccaagattgcaccactgcactccagcctggatgaaggagtgagactctacctcaaaaaaaaaaaaaaaaaagaaaagaaaaagaaaaatgtcctatattgttacctatgtggttaccttccagtgtcttcatgtaagtccagattccatttagtattgctttcctcctgcttggaggccttcctttcacatttcttgtactgtaggtcagctggtgataaatattttcaatttttgtatgtctgaaaaacttcaaacagaatatggaaatgacagaccaccaacactgagcagaaaatattagaatttaatgtaggcaaatttaatctgcaacgctttccaagaccaaagcctttcatttagaaccttcatattaaaggaaagccattttgggagaaagtaaatggcatgacctttgtgacaattttcataaaaatcaatttttaaggtctccattgagctaacataaaacaaatctgcttttgacccatatactgcattaataacatccaaaaaaggctctatatctgaagtagttttctggggtaaaagaatgtataaacaaaaagagacaacctttcaaagaagaactctagatatgaaacaggaaaaaactgatgtgtttatctgaagcaggcttgtaatactatggccccaagtccacagaaatcaactcggcctcatgtcaccttcccagtgaaccttcaggactgagctttcagttttcttaaacaaactcacatgcacatgtacatatgtgtgcacacatgctcacacacacaccccacataggcagaataatgttaatagagctttgcttacagatccccagaagagaaaaatcaatttctatcttatttcttacttttaaaaagctgacctacatggctttaacattcccttcagcttggctaaactttagacaggtttgttcctaactataggtccctgacctcttttttttttcatagaacatttgctttagaaaacatgcattgtaagtcctttctctgcccgtttgagaaataaatctgatgtgggagccatccctttgaaatgtgatcataaagatagtacccctatctcccagtctctgtggaaagttcagaacctaacttcaatcagtgacaatcagcaaacacagatggcctaatcacactgaccagcctctgccttactatcctgcagtgctttctcactagctcacctcagggattacaagctctcctgccttttgtttcagtgcagttgagttccatctctctccttcattgcaatagtcctgaataagtcgaataagtcttccttgccatttttcacaagtatccagtgcaatttctctttggcaaagcccatacatgtattttccagtaaaaagataatgtgaacccaagtacctgacagtttctataatttccatcctatttcttagaaatcaccgaattaaatgaaaaaaatgtggaaacaattaaagttctttgcaaatctatcaggtactttatctagattctgcttgtcttgcaaactctgactacttctgtaagtacataagaaagacttaaatcacacactagttccctagagtgatgggtataattttatggagtatatagaagctagaagggacctagatgttcatttaatccagaattcaagagccaaagtcatctcagagatgttttgtttgctcattacaatgttagaagatgaaaagaagaggattgaaatgcttctggtgggacacgccgtccggtttatcccagaaaatgccctattttcttatacttggctgctccccagaccatatttaccgtctttccttatccatgaaaacctttggggttgttatgcttaaaccctcattttactttttaaatgaagttatatgctcacggaagtaaaataattttgctcccagtcttgataagtagaaactgaattcagtattccagaagtgccagtgcaatacttctcaaccttgattggatatcagaatcacctgaagagccttttaaaaatatctacacctgagacttacccacagcattctaagtacaccggtcttggatggggccttcgaattggccatttccggtgtgcagctaagacgaaaacccattgacacaatatattaccagactgtcttggagattctgtttcagaatgtagactgggagaaagttgctctcaataaataaatttttcattattttgataaatttttcattactataggtactaaagagattaaaacattcaatgattttattaagaattctatgccaataagttcagttagataaaattgacaaattcctccaaaaaacaatatcaaaacatcacacaaaattgtgaatatgaataatcctctcattaataaagaaatgaaatttttcattaaagcctttatgtgtgtgtgcacagaccataaacaccctacatgctataaaactatacaatcttggaaaaataataaaatccaatattattgatggttttaaaaaatgatctccactaacaatagaagggaagtacctaaacgtgataaaaagtatccttaaaaaatattgaaagctttttctctgttactgggtgcaaaaaaaccaaaatgtttacctacatgcatcactgaggttcaataagcactggagattctattcggttggtacaaaactaattgcagtttttgcctttttattttatggcaaaaatcacaattacttttgcatcaacctagtaagtaacccagtaaggcaaaataaaactgcatcaatagctatatataaaacaaaagttttaaagactttttttttttttttgagacagagtctcgctctgtcgcccaggctggagtgcagtggcacaatctccgctcactgcaagctccgtctcccaggttcacgccattctcctgcctcagcctcctgagcagctgggactacaggcgcccaccaccacgcctggctaattttttgtatttttagtagagacggggtttcaccgtgttagccaggatggtccggatctcctgacctcgtgatccgcccacctcggcctcccaaagggctgggattacagacgtgagccatcgcgcccagcccaaaagctataaagattttcaaagaaaatattgaaatgaattgtagttgtatataccagcaagaaacaaaatgaaattttagaaccactttcaaaagtattaaaaatactaaatgtaaaggaataaacctaaaaaaaatgcaaggcctttatgtaggaacctatgaaatgttgctaagataaatgaaagaatatttgaatagagatatttatcaagcctatgcattaaaaactcaatatgtaatatgtcaattgtaatacgtcagttctctacaaactgagctatagggtcaaggaattctaaccacaatcccaattagagagtgaatttgacaagtggattatacaatttatatgaatattcaaagggccaagaatattcatgacacctttgaaaaggacaagatgtcaagattttatctaggttatgacatcttataataaaactacagtaatgaagatattgcaatattagcataaggatagagaatatgcccatggaggaagataagagtgtgaaaatatatgatgcatatataaacatttaattttttaataggtggcattgcacacgcatgggataatagtggtctttattaatagttctgggacatttttggtatgcatcaggaaaaaataatgaagctaaactcctatatcacactattcataaaaactccaattagattatggaaatatatgtgaaaagcaaatcaaaatgttttcttagaaaataatgccagagaatattctcatgaatttaggataagggcagtttatttataattgaaatgcacagagcaatcatcatgagcacattaaaattaagaaatcatgcttatcaaataaatagcatcaagaacgtgaaaaggcaagccatacaaagataaaagatgtttgctaaatatatgtccagcaaaagattagtgggtgccagaggtcagaaaaccttttctgtaaaaggccagatagtaaataattcagactttgcaagccatacagcttctgtctcaactactaaactctgcccttgtagcatggaagtaagtgtggctgagttttaataacactgcattcaccaaaatatggcaaatcagatttggcccatagtccagagtttacccattattggtgtatagaatatataaaaggttgcttcaaaacaattaaaaaacaattaaaagactggcaacccaaaataaagaagaaagacaggaaggaaggctcttaaacagtgttaatcaccagataaatgttaactaaaatcataggaaatattattttataccctccccataactaaaattagaatgaaaataccaagtgttgccaaggatttagagtaagcaagcagaactgaggagtaacgtactgatgttgagagtgtaaattagtaccactactttagaaagttcattggcattattgactaagatacataaacctcacaacccttcaactccacaccaagatataccacaaagaaatgaatgcatgcatgttcccaggacatgggttcacagcatccttgttcataggagcccaaagcaaaagcagcccaaatgtccatcagtcgtgtagataaacaaacactggcatatcatttaatggaatgcttcatcgtaattaacacattacagctattttgcaacaatgtacactgatctcacaaacatgatattggataaaagaagccagtcaaaaataatatttgctttatgtttccatttaaatacatttcaaaactaaatcaaatttcaatcgtgtttgggaaggcacacttagtaaaggtaggaagaaaacgtatgaagacaagcaaggaaatgattagcatggaagtcaagataatggttaactttgaagggaagggaggaatttggattggaaagggtgcacgggggttctggatactgtcaactctatacttcctcatctgcatgatacatacatgagtgtcagctttataagtcatttatctgtgaccttacattttacacagtttcctgtatacactaaaaagacagtttagaataaagttcatgtagtataatttctaatcgtgtaaatatataaagatagaatggtatttatggagcattaaaatgtctattaaaaagaagtgccaaaatatattaacagggagattattcatcaataataggatttgatgtaattaaaaataacttatatttgcttatgtttttatgttttctactctgatcttggattgcttagattatataaaacaataataatgagaaaaatatttccccaagtgaaatgcacatatctaccttctgcttgaataaaagctaggtggtattgtaattaacagtatttaaatataatttcacccaaaggagtcttaagttctgatcttgtttgcttagaaatcaaaatgtgaggaaatgtgggtaaccgtacttatccttcctctaccttctctaggtctttcttttctctacaacaagcataaacatgcatatgtgggttgaacaaaataaactgggttttcccagagtgtggcccactatatgtgaatattttaagtcctgtgcatatcacacacacccacgcgtgcgtgcacgcacgcacacgcacacacagagtatggtgcttcaaagagttaatgcacacatatttcgtgtagaatttgcagacgtgtgatctgaagtgcaccctcatgaatccaatgccctcctgaggaataatttgaacagaggaagagttcctctatacagtaaggtacttggacttcctatgaattcaaatacactgaggtcgaagtgactttgtaaaaagtatctgaggcagctcttagtgcctctgggaaaactcagtctaataatacgtgttgaatatttttacatctttatacagtttataatatctttgttttccccagcctttattattacttagtatacttctctattcaatacttaccaaaccctgaggctacccaataatagtgtaatgttcttcacttcagtcaatgaactttaacagaaaccaatgcattttaactgaatttttgtttatctcaaggagcacattttaatgaaatcaatacattcttgctgaaagccacatgaatccattggaaagaatacattgttaccgaaaccaatatacacttttataatgtctgtatgttttagcgtaagcatagccatacattttagctgtaaccaatatatttctgcaggactgataccgagaaagccttatttcatagtgaagtcaattcagtcttacagaaactaatactgtattccatattcctgagccagcagtgtcaggctaaatgaagactatgatttatattgctgaaaaatgtaaatatttccagaaatgactttaaaataaaagtggttttgaaagtatataaagtattttaatatcttgattagagttacaaaagcagatggagaaaagtttttgaatggaaaagttaagagccttgtgtacaatgtgtgtttcagttaaatatgcataaatatatacactaaaatatatttattattatatttaggtgttagttgctgaattttcaaaaactcctgtttatttcattgaatgcccagaaaaaggatatccttcaagaaaaatcagatgttaaaatatttagagatttcctgtcctagaaataccacgtcttcatccaacctaaaaatgacacaaactcttaatagtcttcctctaattcccctcatccttcaaaaatgtgaataataatagaattattactagtcaaaaactaatagaggaacaccgaaggaaaaacattcaagcgatgactcaacaataaaatggtcaaagaaaaatgtttaaaacaagtcatacagatttgtgtatatgtgtgcatgtacgtatgcatgtttggtgaatttgtacttaccactgcaaaagtctcttggcctgaattatgtaataccattttctacactgagattggcctgctatactttgtacttagcccagacagaaattctaaaagcattacctgttagaaaactaacattttaaaattcaaatgtgcttgtatttagaagtgactggttatatcccaagacattatctaattgggagagtaaccttgttgtataatttatccagagttggaaaagcgagggcagtctgcttccctagacatctttatttgcctttttagtttgctctgctaatgacatttccagaggatgaagaaaatgaagaaaaaagtcatacaagagaaagtataataaacccaaaaatatttttaaaagcatctctcaggaaagcatgaatcctagttaaaattaaaacatttctaatatatttacttgacattcatataagcaatataaaaacacacaagccatctgcttgacgtttttgattaggaaaagtagataaaacaccaaaatttaaaagtaacaacattattcttgctaaataaataaattagtaaaggaaaggaaaaaatattacacagagcagatactaaagcaaaaaaaataggacaggaaacttttttctcttacaaaagcaattatttaaatcactcaaagttccttggcttcaaggcttctgtgtaaacttgcatcctctagctgtgtctctgtcactgcaaagatcccaactcctaagtagctcttacttttccccggggtttatttttcttaaaggggtacaattcaaatgcagcattctgctttaaagatcagccttgacaataaatacttataactttctaaattgggtgtgtggactccagaaatgaaggcaggcagtgagtctcaaaagcacttctaatacaagaaacatcacaaaaataagtgctatattctcttacttcccttttacagatccctagtttttgttcaactgaacaatattctggctgggcatgatggctcacgcctgtaatcctagcactttgggaggctaaggcgagtggatcacctgaggtcaggagttcgagaccagcctgaccaacatggtgaagccctgtctatactaaatacaaaaaattagcttggcatggtggcacatgattgtaatcccaactacttgggaggctgaggcaggagaattgcttgaacccagaaggtggaggttgcagtgagctgagactgcaccattgcactccagcctgggcaacaagagtgaaactctatgtcaaaaaaaaattaatattctgaagtttaatcattttagcctttgattcatgcactttgctgtcaagcttgtctgctacttggatgctggcctcactgaagccatttctagcatcatttcatcgggcctcgtaactgttaaactgggcaactctgccctctccatgtgccccgagctattccactcaagcttggtctcttaccttctagctttcaacttctgcatctgctgtttattcacccacattgaagaaactcccatcattcttaatcattgagcaccacaacattccaatcatcaaagaatggcttgaaatagaacctccttcacaaacccttcccaaggcatgttacctttttggggggaataagctgtaggcacttattatatcctgtcttgcactcacacattgctcttcacatccatcaaagtctcctttcttttcatttcacacccactctgtaactggcctcctctgtcctcacttcactgtgtcaagcagtcaagcagtccctaagcagtagcaacaaactgctatagctggtaggttggtgcccacactttcataagttcaagcagaaaggatgtaatgattccaaatgaatttcaacagtttactgctcacagcacagaaggcctgggtttcttgttcacatgagttcccctaactagctttgcaagtaccacaggggtgaggtcagtgctgcacacacatggatctgtgtcacagctgaggactccaaaataaggagacctggatcttatctatgggtcactggccaacctgctagtcctcccctccagggagaaacaattacctttattatctagaatgctctagtgatgggaaggagacattattacgctggaatgattccaggaagaaaaagatctgaatctctctggacggaaacattgtctacaacttcccaaggttgtccaatatgcaaataaccttgagcaaacatcctttgctcagaagacacgtgcaaatgccagaccatggcgaataatctccctgcatactcccatacccagcccagatctcacggcttatcatgtcaacacttttcttgccaatagctgcagctccctctacaccctgccctgccacacacaccttgccaacactgattatctagcagttttcctagtcactttttcatggatttcctgaggcaaggttaggagaaaaaccttcccatagcaaagattgatggcatctcaatttagttatctccaatttcaggtagaccctcaaaacttctccacaagccttttctggtctttgatcaggttgttttcccctccccacattggctatttcaaaccctcatatctcctacaggccttcacaactccctctaaatcgatgtgcctccaaccaaacaaaattatctacaccatagacccaacctaaatgctcaatccctatgttatcaggcagacttgcttcttgttttgccctaggtttatgctttaatctcctacgtcctattgtgtccggaattggtgggttcttggtctcactgacttcaagaattaagctgtggaccctcacggtgagtgttacagttcttaaaggcggcgtgtcctgagtttgttccttctcatgtttggatgtgttccgagcttcttccttctggtgggtgcatggtctcactggcctcaggagtgaagctgcagacctttgaggtgagtgttacagttcataaaggcagcgtggacccaaagagtgagcagcagcaagatttattgcaaacagtgaaagaacaaaccttccacagtgtgaaatgtgacccggttgccactgctgccttgggcagcctgcttttacttccttatctggccccacccacatcctgctgattggcccattttacagagagctgattggtctgttttgcagagagctgattggtctgttttacagagagctgattggtccgttttgacagggtgctgactggtgcatttacaatccctgagctagacaccaaagttctctaagtccccactagattagctagacacagagcagattggtgcatttacaaaccttgagctagacacagggtgctgattggtgtgtttacaatcctttagctagacataaaggttgtccaagtccccaccagattagccagatacagagtgctgattggtgtgtttacaaaccttgagctagacacagagtgctgattggtgtatttacaatcccttagctataggtaaaggttctccaagtccccaccctattagccagatacagagtgctgattggtgcattcacaaacattaagctagacacagagggctgattggtgcatttacaaaccttgaggtagacacagagtgctgattggtgtatatacaatcccttagctagacataaagtttctccaagtccccactagactcaggatcccagctggcttcacctagtggatcctgcaccgggctgcaggtgcaggcagagctgcctgccagtcccgtgccgtgcgccctcactcctcagcccttgggcagtctatgggacaaggcgccgccgagtgtgctccacggcactcgtcggggaggcttgggccgtgcggtagcccacggggaggggagggggtgggggaggcttgggcatggcgagctgcaggtcctgagccctgccccacggggaggcagctgaggcctggtgagaatttgagcacagtgccagcactgctgggggacccagcgcaccctccacagctgctggcccaggtgctaagcccctcactgccccaggctggcagctccggctggcagctccaagtgcagggcctgctgagcccatgcccacagtgcccacaagcctgtgcagccccagttcccacccgcacccctccctccacacctccccacaagcagaggaagccagctctggcctcggccagcccagagaggggctcccacagtgcagcggtgggctgaagggctcttcaagcgcggccagagtggtcgccgaggctgaggaggcaccgagagtgagcgagggctgccagcacgccgtcacctctcactatggctgtgtctccacccaaatctcatcttgaagtatagctcccatcatccccacatgtggtgggagggacccaatgggaggtaattgaatcatgggggcaggtttttcttatgctgttctcatgatactaaataagtcccataagatctggtggttttatgaagggcagctcccctgcacgtgctgttttgcctgccgtcatgtaagacgtggctttgcttctcctttgccttccaccatgactgtgaggtctccccagccatgtggaattatgaattcactaaaactcttttctttataaattacccagtctcaggtatgtctttattagcagcatgagaacagactaatacaatgtcattcctttccaagacttgctccatcaaattttcctctccatcctgcctctccatcttctttatttcatattttccctgaaattcaagctggctaaatttctttttatcttaaaaataatcagtcttaattatgtctcctgtgctctttattgatcatcccaccatctatctttctttcatagctaaattccttggcaaaaataatataaactaacacttacctctctgcccgctgctttcacaccataccaacctgctttcctacagaaaaatggccatccacttagtggctgcaatggacaaaatgtttttgtccccccaccaatttcatatgttaaaaccttaatcctaagtgatgattttaggacatggggcatttgggaggtaattcgtttatgaaaactgaaccctcatgaatgggattagtgcacttataagaggcctggccagatccagtagctcacgcctgtagtcccagcactttgggaggctgaggcaggtggatcacttgaggtcaggagatcgaggccaacctggccaacatggggaaatcccgtctctactaaaaatacaaaaattagttgggcgtagtggtgagctcctgtaatcctagctactcaggaggctgaggaagaagaatgacttgaacccaggaggcagagcttgcagtgagctaagattgcaccactgcacttcaacctgggcaacagagtgagattccatctcaaaaagaagaggccagaggactagctagtgctctttttactgtgtgaggatacagggaggagccagcattctgcaaactggaagaaagctcccaccagaacccaactatactggcatcctaatctcaggcttccagcttcaagaaccatgagaaataaatgtctgtttctaagcaacccagtccgtagtaatttgttatagaattctgagctaagacaatggccaaatcaaacatacttttcagtccatttcctacatttcccttctgtggtatgacatgctgttgatctccacgtctttgaaatcacttctccaccactacactataagctccttaagagagaaaccatgtcttcttcatctttatgtactcagtcccccacagagtcaacgcacataaaaatggctaaataaatgattttttttgcaccgattatctcccttcgtattggcgctttctcttttactccattagtttaccatcctttaccttccctttaaaagctggagttcacccatgacctctcctcttccttgctctgaagccggaagactgactccctaactaaattgcttattatgccacaaaactttttctcttttgcaggcatccatggatttctgatcattactggacttaccaatctatatgtaacataacccctgacattcaacatgtttaaaattcaactcattattcctacccaccttaaaacctcctcaattcttagtgttcccaaacgtagtagtaccaccctatgctcagtcattcgagccagaattatgagacacatgcgccatatatgtactttcagggggtctcttttgatttaatctagccagcaaccctccagccagtcccatttctactgcatgtgactgtcttagttgaatcccttgtaatttctcacctaaaatattgcaactgctcttcctgttcttacctgttctcccctgttctccacacggctactaaagtgattatttggcaagtcaaacctaactgggtcaacactcagctttaacttctccccattgcttagagaataaagtgtaagctccttagcaaggcatacccagtcctattcatggcctcagtctgcctattcttctagcattgttccctgttcattctacaaagtcgttctgtgcaaaggctcattaaagcatgtgcttgttctctcatgcaaggaacttttgctctcctattcgcttcatttgcaagtctccctacccttgactgtacagtgaactcctactcatacgccacctcaaaatgagcatcatcctctcctctgtgaatggaccacaaggcatttagaagctcccttcaccctgatggatattatggtgtagatatccctacatcacagcaatcattacattgttttatagctattaatatttcttcacatccttcatgatctatgatctttgaaggaaagtgtatttgtcttttatatctttgtatgagaagtagtaccatacagtgtaacatcttttgagccaaacacatcagacattggctgaatgttctgcaaatatatctgaacgtttgtattagagatttaatttctctagtcctttgttttttaacttaaaatggaggtaaaacaaaatggagaatgcttgatacagtaccaggcacataaaggctctcaataaatgatagatgctgtcattagtggcatcaccattaccattattatcattattattattactaatgatttccactgttcttctcaaagcctggtactcctcaggtaatcattaagtgttttctgaataaataatttataattattaaatatatatatatgattaccttaaatggttatcttgttgacattgactcagttatttgctattgttcctccaataacttctaaagtgatcttttcaagtagatatttattaaatatttattgactgaatttctcagtgatcttttgcttctgtggacaaagaaagaataattatttcatttcttttttttgggtatatatatatatatatatatatgctttatgtactaccgtcatttacaattttatagaaaataatgaatgtatagagtttatatttggattcaactaaaatttgcttgctatttaaaagactgtcaatagaaattaaagttagggcttttgaaaataagcctgatttaatatacttaagcctcatgaccagtttttaaaactcttgagaaacaacttggaaatatcatatattatgcacagcctaagattaaagcacccatgtttctctctcgaactcttctggaatgtaaagcattcaagatttattgataaaaaagtaagtggggccaggtgtggtggctcacatctgtaatcccagtactttgggagactgaggaggctggatcacttgaggtcaggtgttcgagaccaactggccaacatggtgaaaccccatctccactaaaaatacaaaaacttagctgggtgtggtggtgcacaactgtaatcccagttacttgggagattgaggcaggaaaatcacttaatcccgggaggcagaggttgcactgagctgagattgcatcactgcactccaacctaggtaacacagtgagacaccatctcaaaaaaaaaaaaaaaaaaaaaaaaaaaaaaaggaagtggcatgtttgtagatttagttaattaatgttaattaagcaaaagattgtaagaaaccctagtgtggtaacatagctttgctttttgtagatatcctgatgtgactataatgctgtctaggacgctggagaaacatcctccaagtcaacatcctcctgtggtcctgttggcaccctccagtgatgctgggtagccagtgttgtgttggcacttggtatggctgctctgggtaatgatgatgatgacttcatatatgagtgtcaattgcctcatactccatattgtcagacattttgcaaaatgttctttgttaaacacattacaaatgcctattttgaccacagagtttctgagtaaagccaatcaaaaaactaccaaaagactgctaacttcaacaaaactattacaaacttcaatggctggaaagacattgagaccaacagtttcaatcccaccctttccaagggaaacttttaaagccttcatatccttctaactcacgagacatcatcccagtaatggacaagagttagaaacacaaacttgactgactgcctttcaccagaaagaatattcaaaaattagaggaatatgactatcaaaaacatttacaaagtatatagctattacttgaaagctatatctatatattttttttccttattttactatacataagaaaaagaccctttatctctgtggctactttctgacatatttctcaccgaactataacctaaaagactcctgaaaaggagatttttgcatgtggcagtaacaccagtcctgtgacagggaaagagcaacccaggcttctattcccttgtcagtcatcagaccactgtccatttccataccacatggcccatactctcatcttttcaccaaaatgagcagcattcataatttctaaatttcaaagatgtattttgtgaacttttactggagttgagtgctttagaaataaggcaaaagagtgctatcgtcagggaattcatctcaccctattgataaagctcagatcccacctgtagtgggggttcttgagtttaaaccatggtgaaaatgtgtacactgctgacctctggtggagatttttattttactcttttttggttaacttgtctttgtgaaacaagggaattttacaccaattaccttcataatagcaaacacaaaaaatatttttgaagtcaatttaaatactgtgtgggacctgtcagatgcacagatgaaattgggacagataacctatcaatttgctcgttgcttacctgctagtcactcattaacttaaaagtacttttagtgtctcttaactctgctacaaaaaagattggaagattggatattgatgtatgtccagtgtggcccatttaaaacatctgccataaccatttaaaagctgttaattcatgtccatttacctatccacacgtcaattacagctagtgaaatgcatttgtcagtttttttcccccttcccttcatctctgaaacattctaacacaaaactgtgcttgctggaaaaatctggtgattactaaattaatgttttatttttgtcttagcatgtcttttggaaaaaacacagtcctgattgtcatattcttcttatgcttaagtgcaacaattggaactcaagaatagccccatgctttgcaggatatgaaaaatagtttgaagtccaaagttccaccctccatatctaatgatgatcagtgactccgttacagaaagttttccctcagtaaacccggaggaagtgggtacttcttatattacaaagatacaatggcaatctgtctgcatgtgatttttttaaaaaacatgggacctctggattctaatttctaaagtttgagtaactttggacaagtcactatcagtcactaaatgtctgcaaatcttagcataagagacacaaagttcttggaagtaaagagaggtattgtgtagacagggactatctctctgatatatggccagagacaaaaaatgatgaaaagcccagccctgggaaggtctgagggaaaaaccaagcagaaagaacaatacagaacaagctcatttcttggaagatcagcaggttagtgggccccagaatagagggatggaaatgatcagatgggacactgaagaagtaagcagctcagaccacacagttcttatagaccatacaaagaattggaatttgattctaagtttaaaatgggagccattggaaggttggaagcaggagaatcatgtgatttgatttcagcttttaaattttcactctggaggcagggaagctggtcaggagactattgcagtaggacaatattgcagaacatgaaagtggcttggtcttagctgccgtggcataatgaataaccaagtatgaggtgcacagttaaaaacaaatttgaaatgtgttttgaaatgaaatgtgttttgaattaagttgcatgctatgacaaatattatcatttaattctcattttttagattacagaagcttagcatttttttttttttttagacggagtctcgctctgtcacccaagctggagtgcagtggtgtgatctcgggtcactgcaacctctgtcttccaggttcaagtgattctcctgcctcagcctctcaagtagctgagactacaggtgcgagcccccacacgcggctaatttttgtatttttattagagacggggtttcatcatgttggccaggctggtcttgaactcctgacctcaggtgatctgcttgcctcagtctcccaaagtgttgggattacaggcgtgagccactgcacccagcctgaagcttagatattaagtgatttgtccaatgtcacacaaccatttggttgcagatttagaatacaaacctagttgccgtggcttcatatctgttatacctgttactctagaataacacttaatagcaccaacttaacattattatgagaccatgggccacttttaagagttacagaatttttgagttggtaggaacttcaaagattatctccttccacactctcgctttacagataaggaaaccaagggaagttttgtatgtttgttttttgttttgtttttgttttttccaagttaactgactttctaaagcttgctcaacaagtaacggacagggatggcaacaagttcaagtatcttgattcttagagggatgttatttccacaacagcatagcaagtccattatttggtgctttctatgacaggaaataaagacatattttgaaagtatggagagaattttgcctacttcacagttatatccaaatttatcttgttcttcaaaataatggcatttgcggcaacctgaatggaattggagactatcattctaagtgaagtaactcagtaatggaaatccaaacatatgttctcactcataagcagatgctaatccataaagacgcaaagacataaaaatgatacaatgggctttggggactcgggggaaagggtgagatgggggtaagggataaaagcctacaaactgggttacagtgtatcctgctcgggcgatgactgcaccaaaatctcacaaattaccactgaagaacttactcatgtaaccaaacaccacctgttccccaaaaacctatggaaataaataataaaataaaataaaataaaataaaatagagaagttgatttggctcacagaaaaaaatggatattttacatggtttctatgtatataattagacatttgttccttaaaaaataaagatatttaagacactaaaacaaataaataaatttatctggttctttattaaatatctattgaacatctattttcgggcactataatagattataaagatttcaaaattaatgttatagccctctaggagattgtaatcaagtgggaaagacaaaaataatgcaaaaatatatttcaatataacatggtaaaagccaaaacacagaaataaagatagtcatgaaaacacagagaatggagcgataactaatcgtatctagaagagtgaggaaagatccaaaagtgaaattttttccaaaccttggccaataagctaggtgatgattggctttgattttaccccacgagtaatggatgctaggcagacaagaatgagattttccctcttcttgatattttcaagatataaaaaagggagaaagtatttcccaaaaattaaggaagtagaagaactgagcttgtccgtgaaggctctcctctctgatcatattggaagaaggtcataacaacattctcaggttatgtgatggtagctcattctaaatctttatcaaaaaatgcattacatttgtggttcgcatctccaaagctgtgtcatttcacagccgctacatgctttcatgctatgcatggaaaagaaactcaagggtatccatggagcagtgctactattactgtttggtttcttttctccatctacctcctctcccaggataagctcaccctcctctcattactccaaccactatctacatggctaaatctcaaattcatgtcttcaggctagacctaccagagcaagaaggacaatttccatgtggatggtgttgagggatgtctctttttcttgattgcaatttacaaagcagatatccagagctggttcagaagaaaaacctagcggctgagtcagaatgttcaaaattaagagattagatcaaaataacaaaaaaaaagtactaaatgtaaaataaagagcactgatgacctctgctttgtggatcccattataccacatacagtcttctaatataacaccagccatattttactgggttttctatttcacatatgtctctttcttgttagaaaattagctcattaagaggaaggaatatctcttgctcattttacatttctggtgcttagaccagggcctggtacagaagcactcaacaacaacaaaaaaactacatgaatgagtaaataaattaaaaaccatcctgaggtatttggggccttcatggtatctattacatcttagcagaataatagaatctctgaagcatagcaagagagggttgttaaagccctccaggtgtaaccccactcatcaaacaaccctcttcttatctgtgtcatctgaagacttagggtgatagaagactcactgtcttctaaggccatttactaatctttgaaaggcttaaatgagaaagttgtttgttttaacaagctgacaactctggcttcctcccatacattctagctgcatccttagggctttcagtgagtaaatacaatccctcagaagatgctttgctatcgatttgagagccttgtctaggccatatttgatttcagactgaacttgttacaagctttaagtcttttcattcacaaatcctaataaaagattattaaaaaaccaattgaaattgctcagcacagcaatatcgaagtgatgggttctttcttgaggtcttaccttcttttaatcaagaagaaagaaaagaactatagactgttgacagtaaccatgtgttatctactttccgcacacttcttttcttcatctaatttaattcttctaatcaaatcatggtattatcattttccctttacagggaagctaataggcattgtttaaaagccaactgttcctggttcaaagatataatgacctacatttgatgttatgttgactcaactgaaggactgtcataaattaatgtatgaattttaaaactaaatacattctttaaattgcagagaaattacctccctctaggtaggtaccatagattttggaattaaaggaatcatggctttatttcctggctttacttcttcatagctaggtaacctaaagcaggcctcgtaacttctctgggattcagtgttctaatttgtgaaattatagtagtaacatagactatgtaaggctaaagtgaggataaaatggaatcacatatgtcaaggtggcagcactatgcccagcacatgacagtggtgatgatgatgaagagaacattgagattcaattaaattgaaaatattgctgctgggaggacctttaacagttccctaatcaaactcaaactgacatcagatccagagggagcaagggttttattcaagatcatagagcaagttagcttcctgccaccattcctaggtctactctcctctctgcagtccagacaaagccctccaggtctagcatttcctcgacaggataggacagaaatgagcagcccaggcatccttggtgttcagctttcctctagcccgtgtgaggggtgcaggagagagagagagcacagtctagttctctgcacaggctctttctctggggtttcttcccttcacatttaattgctaaggacagtcacataaaaaataaataaatcttcatttctgtggggtccatctgctcccaccactcacctgcacatgaaagatgcctgctcgtgaatgcatctcaatttcaaatgaacagtcaaaaaaaatgctcccgtcaaggctgcctcacagtgggtacaaacctctgcaacagcgctcctcctgaggcagcaagttcatcctgtccattagtgaggaggataagaagggcctgtcagggctgcctccccaggacacagggccctcgggcagacagatgcgctgagtgtgaaaagaaattttcaaaagccttcctcgctcccagcctggggcagagcaaacagggctgggaccatcaaagccagctgcttgcctacaggctgacaccccagctactggggtttaatttcacattcttactctctcccgctccagttacttttggtgattatttttatcgtggtatatttgtaaaattatttttcttggatcttccctctaacacccatgtgctgtggtgatacaggatcaaaaagataggttcctatctaatcaggaaagagtaaggaattattaaaattgtcaggggagggctagggacactgaattctatttcttagatgtttccacttttcatgatccctctgtccaatttttccaatctaaagagcagagtgatgggtgcaaatcatttctctatcctcccctctttcttccctcagaagtggaggacaataataagaggtggagagggtgatgtaattttagattcaaaagagggtggtttttaagtcttcatagccagtactacacagattgctgccatataatggaattcttccaagtattttgggaggaatcagccttctgttcacacgtcaacacatatttgatattatcaaattattttataactttcaatgtgcttccatgtttatctcattttaaatcttacaatgacagcatcagatgggtgtaattattcgttacttgttaacaacagataagccagagtattcagggaaaaggaaggagaacagtttgcatcgctccattaagccttgggacattgtcagaataattgtcaaataattcttttcaactagattctctgtcaaactgcctgatacctgagcccaaggatgggagtgagggaggggagtgcagagaagggaggaggaacaagaacctgcttgtggcccccagctcacaaaaatgaactcaactccagaggaagctaaatgactaaatgtgatcctccttagagcaattatcactcagaccaaggagagaccagaaatggggaaccggggcttccagagagttgatgtccccaagatcatggcataaacacttatgtcgccatcaagatccgatctcatcagcaaccctagcaggcctccctgtgagccaaatctcctcagcctttctaggaatcagttttctcatctataatatgagatgcttagacctcactgtctttcaaatcctttttgacaccaatgttaagtggttctaggacaaatcacagcatctactcagaatgtattattttagagatttaaatggacacataagccgtaaagggagttcttcatgttgcttttcactagtcacatttttgactagcactggggttaatatctcagttttaaccttttttgcactccaagcagaaaatgccttagattggaggaatgggtattatgagggggactgtcactttccaccatcagcagcagatctggggaaggagtcacgcattatttgcagaataatggacctttctgattcacacaccctctagtcagctggtctgctcaccagggaaagcagatcaatgcagatttgggaaatcaaggaaaaacaagatggtgacactggaaagaaaatgaataaatgacaagtaaaaagagaaaagaaaggatattccaatattggcaccatgcttctccgcatatgtaatgccttcagtgcaccctccaagaaaggtatggatatctctcctttacacataaaagaactaaagttcagagagtttatgtcacctgcctaaggccattcagtgagcaaatgggtgaagtagaacttaaaaccaatctgtctgactaaatccaaaacatcacactgtgttcctgtcagtcatagtcagctttgtaaatttgtgttgtgttggataaaatatatgttaatggttatgctttgttttacactgtaattcattaaaatactttgcaattgaaataagctaaagaccttgaagtttcaaagtctactaagtaacatcattaacatggaggtaggtgataaaaatctttcccaagttccattataaaatagacttccctcctaatcacaggtagcaaaaatgatcttaaatcatgttatactttatatttgggagagttttattattttgtattgaatatttatggggttttttaaattttcacttggggaggtgggcagttcccagcatccatttctctttatttttcttattacacctatgccatttccaatctttagtgttacggtggacatgtgacccatggcccacctatcaggacagaggattcacccatctatatagataggtttagggattggtgtttgattcagtcacgaacaattggctgcatacggctttttctgagactattggaaaagaagcatgttctcaaatctgtagactttaacctgtaaatacatgagcccagaacggttaggggccaccagataatatctgagaataaagctactcaatgtaaggcagagcgaaaaaatggagaagcacccaactctgaaaaaatcaatagcaacgactgaaactatcaattttcctttttgccagtgtctgttttctgttattagtgagtaaaagagaactcactggtccaatttcattgtatagtccagattaataaagatttttagcaaagcagatttagtgtgaagataaatgaatgttttagcacaaaacatcacaattaaaacctcatggattttacttcatcacataatttcgtctctttggtaagcatcacacaagaaagaaaatgtcaggaacaacattattttcattattttgccactgataagtcttaagtaataccaaggtaggagactggcaggacttgttttctggtcacaaccctgctgaccaaaacaggatctggtccacccaggatgatgtgaagaaactggcaggaaccagcagatcgtgacaaaagccatccctagctgccctcacagctcattagtgtaagatactctcaccagcaccataagagtttacaaatgccatgacaatgccccgaaagttaccacccctttccatggcaatggcccagaagttactgactgctttccctgaaagttctacataacccactcctcaatttgcattaacccactccttaatttgcatgtaattataagagggtataaatgagtataaacacagttgccaagagcccatacattgccaactctgggtgcactgactgtgagttagccctgccctgcaagaagcagtaccattccaaagaagattaggcttgcccttgaattctttcctgggtgaaaataagaacccttccagggtaatccccaattttggggctcacctgtcttacaccagtaccacaaagtgccaaccttttttaccaatcagattaaatttttcctcaattccctctttgtgagaatgcctttcttcactaggaaatggggaccttctctacatttcttcaaatccaaagcatcagtttggctggtatccgtccaagaagggaaaatgaaaagcgtgttcagtgcctgaggatcctgtgctcattgaagcacatgctgctagcagttttttcaggtgttagagtgactgaagacctcactataatttctggactgaaaatggtttctctagatgctagagagaaagagtggcctttcttcctcagtatgatgctcaaatattgtcactccatgcccagataggcagagcttcaaatgccaaagcattctggaagctcagtgtccttcacttaggcacacacagccattccttgaggcatgcccaagctgccagggtgactgggctagggggaatctgaccatgagccacagattgtgtccagagctaagccttccctatgaccatggaaagccagagagtgcaagagagggggagttattaaggtaaagaggtcagttccagttaccatcattgatcaaagacacagctgggattttccagcgacctgaggctgtgagtgtgtgggtgggggaaggctcagaggtgctgaacaatcaaaagaccctccttcccagtagtccctgatagactaccacacattctcgtactagtctaacatatatatttttctaaagtaataggttttaggactaattcaagtttttcttataacatccagagcaggatctattttctgtgtagagtttgctttctatttcattctactttggttctccccagcattaacctctgcatcttgtactactttgttcttgtcaccaatcacacttccctgttttagaacagcattgacattttgtgtgtgcacggtgcataaaagagtacctaacccactttctgccctgtggtatctccagaaataatacatctgccaaccactctaagatattaatagcactcaaaaatgtttccctgtatgcaactccagccttgctatttattgtcagataggtattcaaaatttcacaggccacacagtctttcctcactgtcagggaaggactggcccgccatgaattgctccgattctgaatgagaagcagtgagacccaaagcagcaagccccaggaacaggtgaccttgatcagaataatagaaaatccacatgctatagaatagggcagggaaagcaactcctccacaccaaggttctattgggccccgagacaaatgcctctgctgtgacataaacagttgtaaaatatcatgcagaacttctagttccacattttgggagcacactgagaaagaaggacatgacagccgggtagtacccaccagtcggaggcaatcagacaccccggagcgtcaggaggaactgtagggcactgaaaacgggaagaaaatgaaaacttgggagggctgggcacacacacgagaaagcgaggaaggaaaatgggtttcacaaggaaacctaggaggagaactggctatcaccctggaccccatttctccagctgctgcacggaagtgacagaatggcaagagtgacctgggtgacatgcagggatgggtgcaaaagccaccctcggttcagatgaatggatctcgggtcccacatgctgtcaggactctgtgactcagtgacgagtgccctcaggatgatgcctccccaagcagctggcactgaggggtgactgtggtgacatgaaaagggggagggaggggggcatgtttaagtcacatcaaaagttgagcctggggctgggcgcgtggctcacgcctgtaatcccagaatttcgggaggcggaggtgggcggatcacttgaggtcaggagttcaaaaccagtctggccaacatggtgagacccccgcccctccatctccactaaaaaaaaaaaaaaaatagctgtgtgtgtgtgtgtggtggtgcaggcctgtaatcttagctactcgggaggctaagtggggcaggagactcgcttgaacccaggaggcggaggttgcagtgagccgagatcgtgccattgcactccagcctgggtgactctgtcaaaaaaaaaaaaaaaaaaaaaaaaaagttgggcctggaagagctgttgagtgaatgtgttgggagaatgagaaggaaatgaggtgtggcaggcctggctgacgccaggtggtgggacacgccagtgcctcccgtgctgcctgagggagaggctctggcccctgggagaagcgctaggcccggctgggatgtctggggctgtccctgaaaggagatagtaactgtttggtttgtttgtttgttttgtttttagtgtggggcgttttttgtttgtttttagtgaaactgtcaattctgagagaagccgtgagggaagcggaatctgctcctccagatggaagcggagccggagggaccgcgcggtgggaagccagggtgggcaccgcgggcagaggcgggggtgagctgaaccaccgcaaaagcgggaggagacccgggcacctcgtctgccggccggtgcaccgggggtctgcctttgacttgaagcctaaaagggggtgaatttgggactccaagagcggagatattttgtccagtcatgcagggcggtcagcttaggcttgaaattggaagactggggcaggagggagagtggccccaaactccttactcataagggatgagagttaaaaatggacacggcgtcaggatccccgtggcttaatgctcatatcctagtgagccgtctgtaatgacatttttgacgtggattatggcagtgttacaaccctgctcagaggccgcttactgagtacacctgggcttaacgggctcttccggagacattaattcagacgtgagaattagactcacgtgttcatcgcttccccgcttttctgctaacatcaaatgcagactcatgtattcagaccctgccttctacagcactcagacttagaaagtaaacgcatacttctgcagatatataacaatttaaaatatcttattttacattttttatattaaaattcatttggatgcaaacattaaaattaacaaatagagacagaagtgacatggaacagcttaaaatacaaagatataaacacttttcatcaagataaacattgccttagtgaaactggcccgattgtccgtcagaactaatgtttaccgggtttttttttgaataaacataaaaattaaacgtcccattcttaaaacttgagaaagctgtatctccatctgtcttacctaagtttctttctcgggaaaacaaacatcaggcctcccagatagtatcaaggagctgaaactcaccagatctctgaacaatgagaggccagacccttcacccaccgtgactctgaaacagaccacctgtttcctgttgagcagcccctcttccttatcccttcccaatttcttttcctacacataggtacatttcttccctactatataaaaccctgattttcgttggtcaggtggatggatttaagactgatcttccatcctctaggtcgcagcacccaaagcctttttccctaacaatactcattgtctcagtgattggcttttggtgcagaaagcaatgagacctctaccgacgggatctgtactgagcccctagcgtctgggtaatatataataagtaacttccaaggaattaaaatgtcattgcttagtacctgattttggagggttgggggtcagtggcaagggagatttctagtgaggataccagagtaaaccatgttggtttgattggcagtaacatacgtttaaaatgagagctgagtgagctacaagcttcagcagcatgtttaacgcattctttatttacatgttgtaaatgaaaagttactgcataacactttttaaaaagaaaaaaaaaacttttattcttgaaatgcccaattttagttatggatcatactaagtacaagcaaaggctattttagctgttcttaaaaccaaatgcaaaatatactggaataatttaaatcctgttataaacaaaagagataagatataatgacaactctaaaatagcaggaaaaattaactcattttaaaattagttgttagcaggtataatgaaagaagataaatttaaacaattaggaactgatgaagactgtaaaaattgctatttagaaagaataagtgagaaaatgcttgggaaacatggatatatatcaagcaatagatctgaatgacaaataccctaggctattaaggaaattagtcaagcaacttaattaacttacaatgattttttcaaagctcatggtagtttggatactggcaacatggtacccaccttcagtaaaaggttaggagaaattaactcaaatattaccagtggtaattttcccactaatcatagtcatcattagtaaaattataaggttagaaactcagcacaagataaaaagattatggcaccagagccgtaataaccctgagcatgttaaaatgaaataaagcactcagtgtggtgattcctcagggatctagaactagaaataccatttgacccagccgtcccattactgggtatatacccaaaggactataaatcatgctgctataaagacacatgcacacgtatgtttactgcagcactattcacaatagcaaagacttggaaccaacccaaatgtccaacaatgatagactggattaagaaaatgtgacacatatacaccatggaatactatacagccataaaaaatgatgagttcatgtcctttgtagggacgtggatgaaattggaaatcatcattctcagtaaactatcgcaaggacaaaaaaccaaacaccgcatattctcactcataggtgggaattgaacaatgagaacacatggacacaggaaggggaacatcacactctggggactgttgtggggtggggggaggggggagggatagcattaggttatatacctaatgctaaatgacgagttaatgggtgcagcacaccagcatgacacatgtatacatatgtaactaacctgcacattgtgcacatgtaccctaaaacttaaagtataataataataaaatttaaaaaaaagcacacataacaaaacaatattcaatattccctcaacatcattaagatagagggaaggaaaataaaatttacactggctagtgaatatgtattttttataattttagaatgtaagcactcaaacatttacttaccaaatcactcttaatttgtttagaagttcagctatgtaaattgaaatgtgtccttggcaagggaagactaatcattaccttcatgtaaaagaagtctctagtgaagggtcacaatagttgaccagagagctaatttccattagtgtataccattcactaatgatatcaagactgaacattgtgacatttggttatacctcaatagtgagagcaattttaggatttaaagtttcattgcactgggaatttgtggttaacattggtatgagtacaaaaagggtgtatctaaaacctcacagccagggaaaaacagctttaaataggaaaattggaaacaagtatttgaaaggaaataaaatctttaatgaagataaatgggtagataaaagcaagtaatcagtggaaggatattcctgagcaatgctaatgaattattcactagaatggagcccacgggctgctgggagctgtcctctccccactccacggttcccggcaaaggcaatgactataccagaactgtcttcatgcacactgggccaggccttgaggggactctgactgtggcggatttgggataactaccttaatattgttgaaaacgacagcagctagtattaacattcttgggcagaatataaaatagacacagacgccatggaggaataaagacagagccaccttgtataatagtaaatcacattcttgtgaggtttttgtcagattcaagactaagagtagctttcttctcacttccaaacaattaaaggaaaaagaccatttctctatcaaaaaaaaaaaatctaaatgtatcgatacctctaatatcagacaaacattttagtttcattgagtttctgttttgtttttcagttgtaaaatacatatggtttcctaaaagatctacttatcaagatgagtgtaaaggttaaattacctgagctatcccatggtaaagttgttcacagactttgaagttatatgcaccagttatcatccccatcattctcattagatcatgtttgtacaactctcccccaaagtattaacatatacatggaccatttaagaaacatttacctcccaatagtgtactactgtagtgagtcaggaatacggtgataaataaaacagttctctgccctgagaatttatactcttgggtagaaggtgatattttagtgcaatgtgacaatgattctgatttttttaaaatatggttgtacatgggaaatacacttattccattcctgggtcaaagaagtcttcctggaggaggtgatatctaggacaagaactaaaggatgtgtaaaacttaggaaagtaagagaaggttttgatgggcgaggacaactaggcagaataaatgacatgttcaaacacctggaagagacatttataccagatttttggaactcagcacagttcagtttaggtaaaattttaaaatgtcatcctgtgtttacagagagatgaaactggagggcttgatagaaaccacgttttcaatgactttatacaacctgcaacagaatttggacttttgctggtggtcaacagcagctgttaaggattttaagcagaccatactatgatcatattagcattattaaggcttgtattgaggatttagaataagattattgattactatagtaatcaatattgaccactgcagcaatccagatgaaatatactagtaaaatgatctaagggagaaggagtctgcaaactttcactgcccatgaagttttactataacacagacacatccatttctgtattatctgtggctgttttagtgagacaatgacagagccaaggagtcacagcagagactggcctgcaaagccttaaacatttactatatggcactgaccagaaacattgccaccccttgatctaaaaaaaaaaattatagagaaggagaaagtatttcagaaatatcaagcagttaaaatgaatcatttgtggctggttaaatgtggagtaggaagaaagataagtctaagatgtctactatggattgaatgaacaggtgattaataagctagatctgatatgccttctttaaaaatgctcaactaatatgaaataatcatgctacttgtgatcgcagcttagtggaatacaagtaacaacatactgcaatgtattaaacctacaaaattgtcagtctatatggttcaacacgtagatgaaataggccacattttatctggaatcaaaattgaaatgaagattatcttccaagtaaagttaaacttgccccttcaaatctgatttttttttcttgaatgacttccatacttgtttctctgtgccattaactatgcatgttggacaaactcaagtctcacttttctcatttgcaaaataactgcttttattatatctaatatctaaaagttcaaacattaataaatccagatagtatgattttcaattaatttacaacaaagtaaaaatatagttgaggtggctgtaaatttgagtaataaaacgtcaagagacagaaccctcttgttagggaattattactgggcttaaaaggaaggttccagactagatgcttgggaggcatgtatccagtcaagtccaaaactggactagatacacactatgtttagttagttataacttttaaaagtcaacaaggtaaaaatctccttaatggccaactttctgtaatttctaatacttctgatgccgtgatgattcacctctattgagaaactcagtgcaattactgatttgtttgtctttctttaatatatagaaccaatcagtctggttggcctgtcagttgactaatgagtatattggaaagattgagatgggtcaactgaaatatatgcctaagtcagctgctttgatttttggtgtctagagatacagctttctgaacgttccttttgtcctgcctttttcttctcatatcctggtataatgagggggaaagagaggatcttttgtggtatcacacatttggttgattataagaacactatacgtcatataaaagaagaaatcgggagaacgaaagttgtatatatagtatgtagtatcagtgttgcattgtctattacttcagtatttaggcatttgtatttaagatcgaaagtataaatattgtgagtcacgatcaattttgctttaaatcatttgggcaggtccagggcccaggcacattggcagctaaggcacctgttaagggagatgataaattgagtccttaagtccttggcagaggagctgacttagagataagagataagaaaattagtttgcaatagaatctctaatgattagttgggatggaaatcagaaggtcttctcacagtctgattacattgttttttattatcttggcaacttatttggaacagcagcatattttgcaactttctcccctcagtcccttcagtaacatattttggttgagtgaacagtaaataacaagaagaactagggacaattaactattattgtagccctatgactaatgaaaatccgtacattgcactttggggaagaatgtacttattaacatgcctgtggggggtaggttaatgttgctattttaactttgcttgaaagaaactagagtaacttacccaaggttatccagctgtcagaattacaaaagcagagttcttcccagcaaaggccccaagccaccttgtgaagcaagtcaggaatacctgcagcaccctctggccatgccccagattctaaacacagaatccatctctgcacaatgaagatccttagttagctaactgttgtacatagttactaggaaagctgaatactcccaaagcttttcacattttctttctttctttctttctttctttctttccttttctttcttgctttcttttttccttccttccttccttcctttctttctttctttatttatttatttcttctttctttctttctttctttctttctttctttctttctttctttcttacttttttaggaattttgaacccaataaaaccttcaggactggaaggagatagttttaatggtgaggtgacaattgatgaggttgatacgggagttcatgggccatcaaatcacactgtcacttatctttattaattcaactaaaatgtactgaccacttactgggtagatcagtgttgctgtggcataaatcttaacagcgtagtgtagtattaaacatggggtagatactgaaggcttttcttatataacgtgaaagagagtggtttatcctatagctactggttagctactggaaagttgtgaacagatgtattgttcaattagatttctgtgattggttctggcaataatctggaggatggagtcgaggagaagtgggagcaagaatgaagaagtaacagcctttttccaggagagaaatgatgaggacttgaattagagcactggccctaggtacagagagatgaagacagattatgagatgtatcagtacacacagtacaagtaggcaaggaagacagaagtgactggatgcaggaggcaagagtaaggagaagtctaagatgactgctgggcttctggcttggagaactgactggatgatggtgctgttcagacagactggaatcacaggaggtaaatcagatgaaggctgtatggggtgcagcagatgcaggaatggaaaatgtctttattttgaaagaaagttaagtgtgaaatgcctgcagacatctgaaggacaatttccagtaggcagttttctatacagctccagacctgaagatgaaatctgtaccagcacaaagattgtgacagtcatgatgtagttggcactcatgcatctgggccgcccttgatcttcacccagctggtgtttgatcataaatggaggttagaatccttagaactaaaaaaaaatgagagacattcattttctctttgactttgtttgtttttaatatttttcttaaagccctgaagtattctgatgatcttagcaagaaccaggaaaatatgcacttcaatatcaaggtgtgtctaataaacgttggaacgctttcataaaaccagaaaaataggaagtgtaattcatagatgttttccctgtattccctttgtttccaatggtttctctgagtatttttaatatttgccctctgcctcataagagtcgttaaaatttatctgcaaaacagtaaacaaaagtaaagaattaaaatggtcataatgatgatgagactttatatgtgtaaatcactaaacacaatgtctttagctcataattattcaataaatattttttctacccactttaatagatctacatgtttacaaaatcttctgcagaataaaactagatgagtaatattaatcaaattactagttgtaaaaaatcaattctaagcattccaattcactttgcattgatttgctcttgaaaacacttttaagggtttccttctggttcttttgtttccattcaaagcaccaagagacttgcatgcaataactgaggctttttatttttaattacagaagatttgtttgttcaggaatgtgtcttctgaaataaacctaaagttgatcattgttacattgtgaaaaaataaaattaaaaaccaagaatgttagctgaattctgatagatccattccaagttaacctgaaagtacttctttaaaataaaaaagttgtcatttgtctagaatatatgagaaggaaagctcactcattcaattcatacaggctaatggcgacaccaagtggtatcatattggaaatgtttttagtctgtttttgaacttctgaaagaaattctaacctgggacaattgtgattgtgaccagcatggtttgtaatgtagctctaaatagggtggagttttaaaattattattataactagtatttctctaataaaatttttgtctccagccaaaataagagtcaaaaaaattccatatgcacagtcatgattagtagataaatgagcaaaagtcattttacttatcctttttggaaagaaggtaggaggctgatggtgtgcaatgtgattcagcactctgcagaggctgctgctatctctaatgatcagggtttccatagggaagttcaatccagtgagttcaaatctttctttgctccttattaggtgtttgatttggggtccattatctcaaatctctcagtaataagtttttttccatatataaaatggagggtgatattaacacattggggctttgtgaagattcaactagttcatgtacaggaagtattaatacagtgcctagcattgtagaacatactgaaaaattgtgcttctttttgttaacttcatcatcatcatcaagtcaatcagattgacctatggatctctatacacaaagtttgtctctcttccttgatggaatacaataaaatttatacctgattcctaccctcataggaaacgcttgttttagaatcagtatttttgtacctgagtatttttaaagcagttttaaaattacactagaattcatatagaaagaaatcatccttggcctaatcctgactctattcctggaggtctatttgtaaccaagtcaagagaagagcaggggaacaggaagcttctgctcaaatgtcctcacgtcaccgaaaaatggagtgtgatataactgtatttactttgtaaaatgatgagcctaatatcaatttaaagaataggttcaggaagggacagtctagtcttcagactaaagcagtagagctagttaggccttgggaagagggaaaatgtgtgtggagctgtgaacagacaggttttttattggctatgggaacaccagagaggtggaaatcaaggatgatgctgctatttctcttttcataccttggcagaagaagatctacaaatctagaaggaagtgcaaaaacaattctctgttactacttctaataatgcaaatcttagggcttagagcaaggtttagaacatatcatggaaaatgagggatttgaaacttcagcagctcttcaacagtggtctcacagttcccatttgtcttccatacccataattcaggacttccaccaacaagatgtatgctcctggatgaaatctgaaaatattaactgctgtcatgtttaaggacctgtgcttagtgttgagcaagccatataaactctctgagtttcgattccataaaataagggaggcatttagcatattcctaaactgtctccctattcaaatattgaatctttgtgactttcccataaaccgctttttaatcactgacttcccttagaataaaaaagtttatctcttcctcccatgttgatttttctctctacctaaacaaaaacaaaaataaacaaataaaaaacaaacaaaaaacaaaaatgaaaaaccttactgcaatctaccctgcattgaagaattatatcataggtaggtcctgggttttatggaataaacataattttaaacctgttgtctcccaaaacacacttgtgttgtgccctaatttgggatttgggaaaaacggtctcagtagagatagctagaaagctttctttctgcacctgctgaaaaccatgtgaaccattggataagcaaagcctttcccagatgaaggacttgactgagcacttcagtcaccagtgtgcttctcagaaagggatactgggtcagctctcccctcagccctcaggcccagactcccagccctctttctgggaaggaattgtcaggtcatggacactttccaggggggaaaagtgtctagggtctgtctagtataaataagctttctaacatacagtagcagcaaagcaacttgagccactgagccctgtggcaggcgtttcctccaagccttggttctctaattgaatgtcactctttttattaggaggagaaggagattgcctagagacattgcttaacacttaagtaggctcgcctaaacccctttctctgacacaagcagcagccctggagaactgttagcaaagggcttcattctaatgagagaaacttcaaaggccccaaatgaggaaagaagtgtcgctggaaaatgttgaaatgacaaatagcggtatttccactgacaaaagatgaagatgaaacaaatgttagaacagaaaacatgattttattttgccatgctctcactggaaactatcatcaaagcccttaactgaaatgaaaaaggtatcgacataacaagcacaccagagtgaagttagatttctaacaacgaaagtcatctttgaaataagaaaagcttacaaagtaatgaaaaatctcaatgcagaaaggaaagcatatggcccaaaatagtgttgtgctgcggatttgttaggaacgtcaagctggaagccacttagggatcatctaggcaaacccttttatgtttcaaaggagaatttgagcccaaaggattttaagtaacttgctcaaggtcatataactagttagtgacttcggaattgttagcaactgccttccctacctccgtggagccagttcctgaagtctatctacaaatccacccttgcccggttactgagacagccctggtcagggctgaagttgaagttcaccaaatgctggaccctggtatttgtccacccccacaactgggcaggccgatgctctctgaagttaggtctgtctgacacatgacaacagccacagggacaaaaactttttgcccattatgcttctagaatatggtatgttctggaagaataatgggcaaaaagaatggagggctggcgaaggcatggtgcatcctaaaacctggagcctacagaattaaacattatagataggagaaaagataaaaaggcccaaaaggtaaaatttattattttaaaaaaatgtgcttaataggagagggcctgaggctgactcaagaggcgagatattcagattgctagcctttcagaaactggctaaaggatttgaatctgggtagctcaatttgccttccagatatacaggtctcacattttttcaagaataagtaggaatttttaaaaacggcatggagcctgaagagatgaacaatcttcgatcaaaggaaaagaagcagcatgcaaaatactcagaaaaaagataatctgaaaatgatgtcccgtagaatccaaagataatgtgtggaaactgtttggaatatgcaacaaaaacaagatatattatttatgaaacaggatgatcacagtgaaaggagtctggcatgaaaagactgagagagttggcatgaggaaggattgctgataggatgctcagcccacactctctcttctgaggtcttcagcgttcccagccattcccagggccctttcatccatctagaattctctcccaagcttcatacccagctatgaggctacctttgtgaaatttaaatgtatacattgcaggaacctcaattgtaacaggttcaaaatggaacccttggtccccatctcacccaaagccttcagcaagaaaggcacctcttttcagtcctttgcttatcccaaatccttgtataatttatctgccctcactattcccatacctatcctggtacattctgtccaacatgagaacctatgattcctccttgaaatatgtctctaacaatttccttttctgcatacactactccactactttcaattaatatccctcatctcttgccaagaactattaaaatgatattctcactgggcttcttgtttctatttttgcctccttttattttattctccatatagtagtccaaattacctttagacactgcaaatttaagtgtttctctcctgaactcaaaactctttaaaaggtgccaatagcatgaattatgaatataagtctttttcctggcctaacttaacaactttgatgttccaaatctaccggcctcattagtttcttttgctaccattccccttctgtttcataactctgcttccacatagacactgtttctgttctccttcaataagcatcatctttcaccatcaggattttgcacatgctcttccttctttccggaacacctttccccattaacatagccttacccaaaatttagatcttaaatggtactttctcaaagagggtttccctcactgccaatctaaatatgtctcccaggttaccttttcatggcattctttgcttcctttcttaacacttagttaggacagttaataattatattgttttgcatctcttttgcttattattataacctacactaccacaataggaaatggcacaaggagacaatccataaatagcaatctgttggcatgtgaaattagataaagaacataagcttgcctcctttacctctaaatatcctattgtaatgactgtaagaatggaaaaggaaacataccaaagaaaattggagagataggagggtattccatggtagctggaaggtttggagataggagggtattccatggtagctggaaggttttgggttgatttccgaaagtaataatgtatatggctattgatggataaatcagggtggaggaacttgctcagtacacataaagaagaatgccaggcactggggggaatcagaattctcagagaggctcatgagccagtggacactgactggagcggggggaagaaagagacagaaccacaatggatccatggctcccatctttctgttggcagagtaatcggcaacccagaattactccctaaagaaaaaaaaaattgtgaacttctttggaaagtaattcttaaaagctgccctgagagaaaaggagatttgaatgtggctgatagagcccaatagtagaactcttctaattctgaaattcaagggagtgaaggcagaggaaggggagtggaagtagctagaaggggccacccctccgggcttctttgcctgcgcaacatgcaggtcgacatatttgtccataaaaagcaggctgcccaattagtcacactttctgagacacgtgtcccatgtattcagcagtagagattacgtaaaccagctacctacctcaataatcaaaattatcattactagatatgaatggacaatcaaaatttacaaggagctgtggagaacatcattagtttgcaatgcaagaaccaagattgacactcagaagagctgactccgaaagaaacatttcagacaggaatattaaaaattttgataggatttttagctaactcaagaagtcattacacacacacgcacacacacacacacacacatacatacacagatattaaaaaggaataaccaaaaggcaagatagtgttcgtgaagtttagaacattgttgaaaaaaataaaccagaagagctacgagaaaaagttcagaaaatatctcaggatttaagaatggaaaacagaaaagttgagatgtaaaagatcaattcagagggcccagcatttgatgtgtatactttctagacagtaagatgggaaggaaataaataattaaataaattgtaccatatttcataaatgctaaaatgacctcatctctaaaatgcattattatttcacatattactaaggaaataaaagctctggcaattgaattatgatgccacattttcatccacttgaattgttattttaaaatatgtaaagagttcttttagatatgttcagacatatattttattatatattagtcttgatcatatataaaattaaatatttgtaaaataatttcaaaacatattcagtctgactcttttaaatagttacgggtcttaaggtcatatatgctcatttttcaccccaatattgcttattgtaccatcaggaactttaggacatgggcattatgaaacacttctaactgtcaccaaacataatactattaactcagattttcttccaagcttctgaaaccatttctgcaagttttgatgttggcattatttcatatggtatgtatagttaatacaatagcccagcttccacttgtaaggagggtggctgcctttcttagtccctataaagcatgggcattgctttgcaagaaaacagtaaatttcactcattcatccaaatataagtatttgcttccctaatatcaactattgcatcaccattccatttcagtaattttcagcattcacaataaattttcgacttcaaataacaatacattgtttcaaaattaatggcagctctactcaacaaatacagcaccaacatgaacttgcggtgacaacaatataggcaccaatgatgaaatacacacttgtatggacactgataattacatcaagatcttaatttcagaagcatgaagatatacaaaaatagatcttaatatgggccttaagcacagtggaatattcagctttttattaaatttctattttttatgttcatctgtccaacattgaaagaggcatattaaagtttgaattttatcttcactatgaatcatacccttttctataccaaatgacagcatttctgcttttttatttatttcattgaagtctacttttttatattaatagcttgacacctgatgtctttttgtttaaatttacttgatacatctttgcctatcatttcacatttatatttcttgtcactttatttgagataagctaactgaaaaccacatttggcaaaacactgctgttcatttccaatctaaaagatttttgtcttttagtagggaaattacacttagtttgattataaaatttacataatttagattcatctcccttagctgattttagttcttgtcacatcattttataccatgatttcttcattcttttgttaaatttctttttattgtgaaatatatcatgctcataaaacaatgtgtgtgtgtatatatacatatatatatatatatgttaatagtaagttgaataaacatctaatacccactacccagcttaagaaacagaagatcataaatgactttgaagttcttattgatctaatggatcacattcattccttcccccagatttaatactatcttgtattttgtgttaataattattttttatgcctttgccatatatatgcaccttaaaaaaacataatgatcagtttacctattcctggattttatacaaagggaattgacacctgctatttttgctctgcatgatgttttgtgttggtagctgttattaattaattttccataatgtgtggtattccatccaaagctgtacaacctcccaacagtattagtaacattgtgttctatatgaatagtgctgaccatgggaacagcgcaccagaactgagcaagatgatgactgtgattctactgtatgagtgcaatatcatttgttcctttgaataattcattatttattatttctatttatttttcttgctatgagtatgattttgcatgtcttctgaacatatatgcaagagcttctttagggtttctaactaggagtagaatatcttagctttactaagtaatgcgagatcattttcctaagtggttttaccaatgcctgttcccaccagccatgtgcaaggactgttattgatgtttgccaagatttggtatcaacagacttttaaaatttagagtccgttctctaatttctattttagtttgttttctcttattaatgagattgaacatcttttcatatgtttattggccttttattattttatcttttgtgaagtagctgttcagatctttgtctatttttcaatgtggttgtttgcctttttctcacagattctttcatggaaatacttcatatttaagataattatctttttatggttaaatgtgctaaactatcatctcttagtttctgtttgtatttttataatttttatgatatatttttaaagtaatttaaatacatgtattttaatgttgattttttcaattgtttcctcttattgttttgtcacaaatatatgacaaaaatccttcacttcactaaggttataaattattttgccatactttctggtagaactttaattttttcaacagttaacttattagcccatttatacctagtgtcccattatcggaatgctaagcttgtgggcattattgatatccaactgctcaaggtcatcatcaaggtctgattcttcacaaaaaaacttttgcagcttccggcataaatgggttgtcagcaattctttggttttcatcttttacataagaaaaatcagttttcccagcacactacactgggcgatcatttccctgcggatctctaatgccagttctttatcatctcacatttccacatatgaagagaactatgcttctgagctcagctctctattctgtgccattgatctgtttgtctatccctgtgtacacaccatgctacatcactagagttttataataagttttaatgtctgctaaagcaaatcttctcaacttgatctttttctttagaagtgtcttggttattttggccctttgcttatttatgtaaatttttaaatacatttttcaagttccacagaacacattgctaggatttggactagaattacattgcatcaataagacaagtgagggagaactgacaacttttcaactcaaggtctttctatgaatgacatgaaatagctccatttattttggtcatctttaatgacattctatagcatttgataattttcaacataacaatcttgcttattttttgttaattatcattcctaagaatcttaaggtttttgagctagtgcaaatttaatgacattctctaactattgctatttagatgcataaaaatgcaaattgctcttgtataataatgatagttactaactgtatgctgcgttctactgtaccaggtcctgagctaacctctttatatactgattaaatcctctcgacaactctatgagctaggtcctgttattataaccacgtctcagattaggagactgaagcactgagagggttcgttaattcacccttctacgagctctagcaagtgcaagactggagtttgaaccccagaatctgaccagtgtttaggctctagtgtatggcctatcgtgatttgcatctgctatgctcaaattgtttttgaattatatttgaataacttaaattttaaataattatatttgaataatagagaatttaataattctctattatttgtgatgcagtcctataatcatataatctaggaatacggttttgttttgttattcaaattattatgcttttgtatattgttctggccaaaacctagggttcactactgaataagagtaatgggccaggcatggtggctcacatctgcaatcctagcactttgggaggccaaggcagacagatcacctgagctcaggagttcgagaccagcctggccaacatagtaaaaccctgtctctagtaaaaattaaaaaaaaaaaaattagcccgcgtggtggcaggggcctgtaatcccagctactcaagaggttgaggcaggagaatcacttgaacctgggaggtggaagttgcagtgagccgagatcatgccattgcactccagcctgagtgacagagcgagactctgtgtcaaaaaaataaaaaggtactggaaatcccctctctcctttgtttattaagaatttttctcctgaatacgtgttaaagcttaatgaatgttttttccacacctcttgaagtaattgagcaattctttcattttgtttaacctgtcaacttggtaaagcataaaaattcatttttaaatgttgcaccaaccttacattttatgatacaaaatacttttcatataatagtcttataataactttgggtttgatttgtcataattaattaattaattaaaaattaagtaacaaaatattaagaacatacctattatccaacagtttagactggcttttgatgttctgttcttgtacagttcatatctgattttggtattgatatgggttgggtctgtgttcccgcccaaatctcatgtcaacttgtaatccccagtgttggaggtggggcctggtgggaggtgattggatcacaaggacagatttccttcttggtgctgttctcatgagagtgagtgacttaccatgagatctgattgtataaaagggcatagcacctctccctttctctcttcctcctgctccaaccatgtaagacatgcctgcttcctcttcacctttcgccatgattttaagtttctggaagcctccccagaagcagaatcctgtacaacctgtagaaccatgagccaattaagcctcttttctttataaattgccagtctcaggtatttataataccagtgagagaacggactaatacaggtatcaaagttatattagctttataaaattagttgaagagtacgcttttatttttaaaataatggcaagatattctttttgtaaatgtagatcatctctttcttttcgtttgctgaaatttacttgtaaaatcatctgaaactggtgttttctctatgggagaacgttaaatttttgatttaattttttaaatgtttataggctcattcaggttgtttttttccttacaaatttggttttgtaaattatacatcttcttgaagacttttctgtttctcttaggttttcaaatatattgacataaagttgtttatggtattattttattatattgtaatctctgctgcatctataattatgtctcctttttcatttttactcttttttatctgtgccatcttgtatttttttcattgcagttaatctttctggaggttattttactttttcaaagaatcaagttttcattttttagatcctctctattatattgtttgtctgctgtttcataagtatcttcttttatttttagtattttctttcctctgagtcatttgggtttattctacttacacatttctaattaagttggatgcataggtttttttcagccttgttttttctaatacagacatcaaaatctacaaattcccatgaagttccattttagctgtaccccaaaagtttttattttactttattttgtcattgaattagaacttatacaaagtactctagtcataagtatatacctagtgattttcaaaataatagctaataattttaatccatgtaactatcaccagatcaagacatagagtatttccagactcctagtcaattaccccacgctacttccatcgtctctgactgccataatacaataccacagactgggtggcttaaataagagaaatttggtttgcattcttgaggctggcagtttgcaattagggtgccagcatgtctgggttctagagaggaccctcttcctgggttgtggacagctgccatctctgtgtcctcatgtggcatttcctcggtgtgttagtctctcttcttttaagggcattaatcccacatgagggttcccattctcaagacctcatataactcaaattacctcccaaaggccccatctctgaaaaacatcaaattgggggttagagcttcaacatatgaatttgaaacaaaaacattcaatccataacacttggccacagaatatacctatgtactaaggcagccttaactttccctcagcttgactatctttaaataggtttcttcttgcctctaggtgcctgatctccctctcatcccagcactcacggaatccagatgacataaccacatggccattttatcagagcactgactttagaaaacttgtcattgtcgatgatttctctgttccttggacatgtaaatctttttaaaagcctcttgacaatttttcaatgcaggactctttcctaaggacctgggagctgtttcaaaaatcatcaaggaagatagcatcttatttccctgtttctgtgggagggtgggagaataatatcagcgggcaccttgcttgaagttgtaaaattacctcctgccatgaagatatgagaaaatttatttttcctttaggtaaggccaagtagaaaacccacatgtcctaatacctctccccaccccagttctcaaaaactctccagccctttgttttagtgaagttgagcacagactgagatctgatctctctcccctatagtaatagcattgaataaacacttccttacaggctatcttagtctgttcaggctgctaaacaaaagaccataaatttggtggcttataaacaacataaatttatttcgtacaattttagaggctgggaagtccaaaatcaaagtaccattatatttgatgtctggtaagggcttattctctgctttatagatggcaccttctcactgtgtactcacatggcagaggggcaaggtagttctctggggccccttttatgaggacatcaatcccatttatgagggctttttcctcaggacctaatcacctcccaaaggtcccacctcttaatactgatacattggatgttgggtttcaacatataaattttggtggaagacggcattcaggttataggacatgcttaactttgcttagtgcaacgtttgcttcaacactattaggcttttgtagatatggccaattttttgagtgtctttactaatttattcccaagaaaaatgtaggagaattccagttgttctacatcgttgcccactcttgatgttgtcagtggttttaattttacctactttggtagagttgtggtggtatttcactgtgcatttcatatgaatgtcttgataactaccataaccaaatccttttatatttccttcttggacatttgaatgtcttcttttgtatttattcaggtgttttgtgggacccaaagaagctcgcaggttgcaattagttatcacacatcctcctgtggcacttccacagtgcttgtcttttatgacattgcctcttttagagagtttcagccaattatttggtagaatatccctcaattcaatgccgtctgatgtttctgtacttacactcaggtgctgataatgttggcaagaatgtcacagaagaagcttgtgcttctcagtgtatcctgttaggaggcacaagatgagagtttgttacattcttggagataatgacactaaacaacagaagcattcctttaaagtttctgtagagaaaaatgttcagtgtggcaccattgctagataaaatgaatgtaaataaataagtgaagtaaaaataaataaaaatcagcaagctttcaaatttccaaatattctgaaatattaaaatatactttttatttaaaataatatacatagctcttaaaagtgatcttatcataatcttttaaatgttaaaatatcacagtttataaataggtatatgccaaaccatgaataaccacagattagtaagtgaattttagaagtagccaatttggaaataattcaaaatatagttattgtaattatttaattgccataaatttctcaagttctctagggcttttttcctcttctctataccgcttttattttatatcaattcaacttactgagaggaattttcaaggctttttttcttttcagcaagcctgttagccatgctaagcaaatactgagtgccaggttttttaacttaatgacaagtggctggaaactctggtgaatgtcttcctctatatttaagaaaatttatctgttgagaaaaacactttaaaattaccactattgtcttccggtctccaaaaaagatataggcaaaacagttttctcaaatactccataaaatttttcctttaaaaagagattattttattttaaacaagaaatcaatacccactaggaaagcaataccatgtcagagtgagaaagagagtgtgtatatcctccagaggccaaatagaatgtaattttaaaatgtgcaatggttaattctgtttatcaatttttctgggccacaggatgcccagacatttggaacatcattatgctaggtatgtctgtgagggtgtttctgggtgagactgacattttgcaatggtacaccaagtaaagctgactgccctccttaatgtgggtggcccccctccagtcaaccaaaggcctgcatacaacaaaatgtctgagtaagaggaaatttcacctgcctgacactggaattggagcatcagtctcctcctgccctctgactggaacttacaccaccagctctccaggttctcaggccttcacattcaggctggaactactccaccagctttcttgaatctccagcttgcttactgcagatcttagcacttctcagtttccgtaattgcatgagccaatttctcataacaaatacacacacacacacacacacacacacacacacacacacatttgtccctcaatatccaatggagtttggttctaggacctcccacagatactaataccccccggtgctcaagtctctgatataaaatgccatggaatttgcacataatctatgcctttacttcaacatcactgcctcagcggcttccccagtccctaccctggagatggtccccacttcactctttcccacctgcacttcctcagactaacccatcaatcactgcattgtcattactcctgtgattggcagctcctctaccaggcaaactctctaaaatcagtcccggtggccccaactcagcatcaggaacagtgctgggtaaaagggggctcgacaacgtggaactgaataaaagaattaggagggacaagaagtgcttgcacttagaagtggatttggagcgctagttttagcaggacctttcctgagaagactgaggccaggtgtcagtaggcaggtgcctgagaagagaatgcgaggagaggagatggaaatgcggtcagacggccaagaacgcaggactcccgggcactggtggctgagcgtgccgggggcttccattcgggcctgcagacacccacagaccttattatcccggccccgccggcttgggggccttctgccttccttctcaaagggcacgaccgcaggcggcggcgaccacagacggcggcgactgcaggcggcggtggggcacgagtcggcaccgagggcggacccgcggtcggggtgagtccctacctcctgggagaggctggggccgcgtgggggacccggggcggggtcggccgacgccccttccccagcacccgccctccccggcttctccaaggcctcaccccgccgcgggaagagcaggtgaccgcacgcgagggccccgcgggggacccagggctggcttgagcgcactggcctcctgctcttgcaaggaggactccaaaacgattctgaaagggaaagtgtcttgaaattaactggaggccgaaacccaggggaagctggtggtgcaaaggactcatccacgctttgggctgttacatagagaggattttggaggaggggcaagagaagttgggaccctgggcttttctgtttcaagcaagcaaagggagggtggcggactcctatttcagagtagggaggagccttgggtctttatttcttacatgtatcagggactcacctgaaaagaaaatgatgtgtgccacaagtaattagtagcattcctgaccccatatacagagccaggcgtcctaactcctgacacctaagctcttttccacccctggcgctggagccacggtgctaagtgtgagtggttctgtccctgggctgcacatgacagaaacacgtgcagactgcgtggctcagacacagagtggctggggacactgctacgtcctctatcggggggttcagaggcagggcgggcttcaggctgactcagcagcccgtgatgtcatcagagactcacattctccctcactcactgccccaacttcatcctcaggttggtcacaaggggcctccgcaactggaagcatttcacgtccaggacaagatgtccagaggaagagaacagaacaaatgacttactgaagtagaaagcgtttcccagacctgtcccccagtagatgcccttcaaagtagccagaatccgtgcattctaacttgagcctggattagggtggggcaagcaggtgtctagggtacaaaagttgagaaagcacgggtcgggcgcggtggctcacgcctgtaaccccagcactttcggaggctgaggcaggcggatcacctgaggtcaggggttcgagaccagcctggacaacgtgattaaaccctgtctctactaaaaatacaaaaattagcgactgtggtgggcgcctataatcgcagctacttgggaggctgaggcatgagaattgcttgaacccaggaggcggaggttgcagtgagcagagattgctccattgcactccagcctgggcaacaagagcagaactctgtctctaagtaaataaataaataaataaataaataaacaaacaaacaaacagaaaagaaaagaaagcagaatccttaaatcgagtgcctccttacagtagtgccttaggtccccactctgattttttaaatgatggtttcattgagatataattcacatactaaaaagcacccttttaatacgtgcaatgcagtgatttttagtatattcacagactcgtgacactatcaccactaattctaggacattataaaaaaattcacttccttagtactcattcttgattccgttaaaaaacagagattgtcagactggttaaaagtaagacccaaacatatactgtctacaagaaattcaccttgcatttacacaaataggttaaaagtaaatgaaggtaaaatgtgcaacatactattctaatcaaaagaaagctggggtgactataataacatctaacaaagtatatctcagagtggagaatattactggagatgaagaaggttatttcatcatgataaaggaggtcaaatcctacatagcaatcctacatttttattcctctgctagtaagagagattcgaaatacatgaagtaaaaccaaatgtaaccatgaagataaaaagtccacaattgttagagagagctgccaggtgttgaggtggtccattaagacactgagccaaatgggagagtgacagtcaggcttttattcatttgtgggggcaggggagagagggagattggagctggagtctggaggaaggggaagagctagtaatggaaaagcaccgagtattgagtcagagtggagaaaagtatctccaggccccctaataaggaggtcttggcagtgtcccaacagagcccctgccccataaggaggcctctgaatggaggggccagagctagaaatgcaggtaggcacagggcatggctggcccagggggtcctaagcctttgatggtgcctccctcccgagatcacaaagcactagctatgaagtctggtgggagaagggcagatttcacccaagagtagaatatctgtaattgcatatggttgggcctgaaagattccatttaggattttgtcctgaagttgtactcttcaacttcacctcttaatttttcaggatccttgaaagaagcaaagactaccctatcatggtcctaaataaatggaatttgcgggattatgacaataacccggtaattagtctgagccagcaatggaccaagttcatcattgaaatgtttccaaataggatgataaggacttcttggaagattaaacatagccatgagcccccaacaatgccaatccaggataagatgtttcaaaggtcagcagagtctgctttagagagccggactcttccactttgtcagattcattgatccaggtgcaccacgaggtgttgacagtggcacagactctccttggctggccagctggaagtccagggctatgcagctgctcaaatactcaaaccaaagagctgaggctgatctgttgtgtctccaaaactaaggtagtgttgttaatgacctcagtgatggtaagagacaggtgcacaaccttttctcactgagggacctgagcagtgggaaaaaccacccagagcatacacatgagcaaagagggtcagcagtgcttctcacccggtaagccctccaagtaaccagggtaggcttggttctggagctcatgccttactcagcctggtgcaacatgctccttgggagaggttgcttggaatatttgaaaaactcttattaatgccccattcgtgcagattacaaggctatcaaaaaggaaggtaaaggcctggtgtttagaaaagaaagaatactctaaaggtatacatcgggttgggagtgtaagagtcattgactaccataaggttcaaccccctagaagtccttcttggtaggcagtaggcagagtccctgagtggaactgaagagtctgtacaaggaggggacaagtggaggagaggagaaggtcaccaccatcaaggccaaaatagcccagtaacagacccaggctcctcttcccagttgctcccatgtggaacagcattgagttgacaactaggaagtcatttcgttcctacagtaccagggtccacatatcaggtaacacattgggtccgggtgtgttagggcacctgagatgccagaaagctccatagttgaagaaatgtccactcatgctattcagtggcatggcagccaaagatttacatatggggtcaaggagtgagtggcatatccaactactagtcaagttcagcatgatggcagctgcctgagtcaggcctacgaatgaattttgtaaggccagagtcacacagactacccatgagagagaggagagaggttagatcccacttcttgccccgtatctgagttcacaggaccaaaggttctcatgtcttattagttcaggagactcctcattgactgtgacatgggcagtctgtcccgtgccatgagcaagaatagtgctcttaattcattcttagaatggtgaacctaaatattctggcttggcttctcctggggttccatcaaagtttctatttgatatttgatatgtatcccatggggctacacggagtaaagcagcagggccaccttagggaaaatgttgagacattgaattgatggttattatctttgaagtccttgtaggcaaaattcaggcactgcaaccagggagtaaatggagaagcaagttcatgcctcccaatctgtgctgtttagtagccttcctgatctcccactgattttggtcttcaggaagggctcaaaaaggatggagggaacttgcatgatccaccatggaaactgatttgccaataattttaaaagaggggtgtgcaactgagggaaagagacagatagcccaatcaatcacacagcacaaatgagaagtgcacttagagaattgccgcagtgagaccccaaattgcacacctgagacatgtagccaggctgggattatattgtccatttccatcagccacttcaacctgttcttttcctgttaaaatatgcgatcattgctgtggcttgtagatgatacagagcatggagaatccatcatgcctcataatttgacccatgtatagtttgggctgcaaatgtatcgtttgggccattattagatacaatgtattcaggaagccagagaaataaacaaatatggttttggagggactgaagagtgttgcctgagtcagggaaacacatggggatgactagtccaaatacagagaactcatcaactacatttaggatccagcagaatgctctggatgggatgaggggactagtgtgatcaacctgcaaagaacatcctggcctttttgaccagaaggatctgtccctgagcagaatgtttagccttgctcagggtctggcgggtggattatctttttcatgctgtgttggcatcttttgaagataatagttcatgcatacagatccaggctaggatggcatcttgattcccagggcccttcctctcatggatcagaggcaatgagttgaatatctgttatctctggggcagatgacaaatcattctccatgtttagctgacatgcacggtctgctcattgccttgattggctcattgcctttgtcagcatagggagctctctggtgagcacccacaaggataacaaagagcttattaggagtagaattgaattttatccgaatgtctcatcccaagagagggatgtgttttacatgtcagcacaattttgccagtagctcaatcaaatgttcagaccattaactacagcccatgagtcagtgaaaatatagcagggctcctttgttgagggagcctgggtagccaaccatactttataaagctttgcacatttatgctgaacttgccaagggatagatctatctcaggttgtatgacagctgcacctcattccagcatagtaaatgttaatcaagagacaccgtcagtgaaccaggcttatgtgtggcccagaaggtccttgtatctgagttcccattggccaagtgaaggcagtggctcattggacgacatgcctgggagggggacaacactcctgagtccttgccattgagttgaaggccccagctgggctgggttttacctgcttctgtgtagaacattttcattcactagagaatactcttaagccacacccacctggatatttgaggcctctgctcactcataacatgattggaatttgggatcataaaactatgtcacagccgtgagtcacgtactcatgcatatctacctaggcccaataacaggacaataattgtttctcaaagtgtatgtgccttttggctgactccctttcagctgactccaggatcttataagttgaaaaacccaacaagtgtctgatgttatttttctactatgagcgatagtaaaggaactgaaatgttgttgagacctgtaagtcgaatggcaaatgtggatccatggggtccaggggaagggagggtacttggatggctgtggtagcctgttgaatgggccccattgaaacatagcagccttttctagtaacctcttagttgggtcccatcaaaatccccacaagggaaatgtgacagtaacagtagatgaataagcccacaaatcactgggcatcctttttatttgctggggcagagacagccaaaagcttggcagtcatctcctctaaacgagatgttgtgccacttgcccagattacaaccaggaaattcacttggggtctctgtctgttaatggtgtagttgggttgctgcgtgaaagtcatcagtcctcaagcacctagtccttatttggcaatgtctttgtttgggttcacaaggaggatgtcatcaatagagtgcaaggctagtgcttcctccaggcaagcaactctccccagagcataacctattcattgatggcagctatgtggggaatttaggtcactttgtgaaaggacattaaaggtggattgcaacccattccacataaaggcaagttgatcctggacttctccgtgtgggaggatgctgaaaaaggcattgatgatatcaactgtcccataccaagttccctccagtagcctctgtaagaatcaaaatgtcagatactgccaatgcaaagaatggcaccacaggcttgagccacctgtaatagacagaggatcaccaggtacctgaggccatgtgcgcaggccagacagagctactgtatggaggaacagtttctcaggaactttgcctcaagcttagcaattgaaaccagcccaattgtcccataaaactaatatttatggtttattttgaaaaagcatataaattaaccctcatagtcttaaaactcaagaaaattacagttatctgagttcctttctcaggaagccaaccatcagtgcttgcagatattatcaagcagctaaaacccaccaggtctacacatctggacaatgagaaacccgacccctcacccatcatgatggcctacgcaaccacctgcttcctgttgaccaattcctcttccttacttctccctaattcctgtttccccacacatggttacatttcttccctgctatataaattcctaattttagctggtcagggagatggatttgagacttatctcccatctcctcagctgtagcacccaattaaagttttcattcgtctttgcaatactcattgtctcactgattggctttctgtgcagtgaacagaaggacctagatggaattcctgatgttttagtgacataatgacagcagttatttttttcctctctaaagcaggtggggatacaatggcctaggcgacagtaattgggtacactcacagcctttcccatgtcccactaagatgaccctaagtgcagcaatttccatcagggattgagggtgaaggccagtaggggcacatatagacaatacatctataccaagaacacatgcagtcatgggagccataacgtaaaggcctctaggggcccaaaggtcccttcccagagacagagcaggtggtggtggtctcagaccctaaaccagagaacattatctgtttccccctcatcctggtgccagggattgtggggatcagaggtagcagtgcacagatgttcagcatggccaagaaggacatttcctcccacctcctcactgaactctgacattggctagggcttctagtcatccctggggacagagggacctcagcctaacccctagtcttgttaatttgtaaaagtctagctgtctggggagaggatcgtgaggctcttcaagtcatctccagagtcactgggagggatgacaacaagcataatgcttgaatcagtcataggggctatcaccatgcaaaccctcgtgagctgcctgctgggccccccatggtctggtatcttggtgaggaactcttcagtctcctcctttgagagcccctttattgaatcatcaggctcagagagcaatttgggaatgtcattgcctagatcgtccagtagagggcgccggatagtcatctttgcctccctgcttctgcaatctgttttcttggaagcagccactctttccatgccttaggcatttgttaaaatagctggattgtgtctgggacggactgagctggccttatgaggtttacctgggcttgataaccagcagtagtggcataaaaattcttgaaatctgagtctggtgaacagtcttatcctctgcttcccccagcccctcattgtagacccagaggacccccagggtgacttgcggggctactatagcctctgcgaagggcatccagaagtgtttttcaatggcatgggtcttgttacagtgtaccaaacctgccagatctgtcggagcccaagtagtacccagctgaggaccaatgatccccctcggaaccgaaaagcttctgtaaacaacacattagcacactctaagggtgccctgcggggtccactggcacctcccagacaccccgtggcatggctggcaagtgttctgcggtaccctcagactcttgcagatgaaccaccagcacctctactgtgccctgaaggacttttaggctttttgtttttccaaaaaggcattgtgcttaattgaccactcagctcctttgtcaaattgagagagagagagagagagaaagagagagggggcatgtatgtgagtactttcaggtgttaaggtgttgaattaggacaactagccccactgaaagtaacagtcaagcttttatttgcttactgtgataagaagaggctacccaggacatggtgccattattttccccatggaacagcaccaggaagggtcagatgacaagcagcagaggtgggagaattgtctcattgcctagaagtcccaaacgcaaggttcctgccattttgtggacccaggagccaaggggagggacaggagggatgggatgggggaaggatggactagaagtggaaaagtactgagtgctgagcttgagtgcaagagagtgtcttcaaggctcctgataagaaagtctcttcagaggctcctgaacagtgtctcagcgaaggcctctgctcccctcataaggagggctctgagtgaagctgtctgagctcggaatgtagagatgcataaaggcatggcctggctcaagggcctgagtccttgactgcagctcccactggacacttcaatgccctggctgtgcaccaaatctgtgagcagggcagcttccccccacctcccccatgcagcctgccttgtagttgcctatggtcaggcctatgggatcacatatgggattttgacctagagctggacctgtcaacaattatagttggacatgtcaacactcatctctcaacaattgctagaacaggcagacacaacattggtaattatatagaagacctgaacaacactatcaccaacttcatggaattcacatttacagagcactacaccccaaaacagcagaatatacattcttttcaagtgatcatggagcatttcctgagatagaccatatttaggggcataaaataaatctcaatatcttaaaagaatacaagtcattaaaaacatgttatctgactatggtgagattcaattagaagtcaataacataaaatctttggaaatcatcaaaactggaaactaaaaattacactttcaaataattcatgagtcaaaaaagaaatcaaaaggaaaatcagaatgtattttgaactgaataaaaatgcaaaggatatcaaaatttattgatgccactaaatcaatacttagggaaattttttatggtggtaaacacctatattaaaaaccaagaaaagtttcaagtcaattacctgtttcaccttaaaaaaactaaaaaaatacccaaaatgtagagagccagcaaagggatcatgaccaactcagcattccactggaggctatatgatcaaacagcaaactgtttatcatgaatgcaggatgtgggtaaactcacactgcacctgccgccaagaggtttgctgagggtcatcactccctggcaccaggctccttgaagttatctactggaaaatctagcgcctattgttcaaaggatgcagtgtcacaagcctgctgtgaaccaaacggccgactgacaattacccgacaatcacccccactttttttgctatctcttttacctaataaatacggaggactgaaaaagtttagggcccttgcctactagaggcaaggtgcccccgaccccttcttccaaatatactcttttgtctttgtcttttattcccgcgttcatcctactttgttcagtgcatcagggatcgtggtcggttacatcaaaaagtgaaaaaattaaatgtgaagtaatcagaaaaaggaaataataaagatcagagcagaaatcaatgttgtggacagaaaaacaatagtgaaaatcaatgaaaccaaaagctggttctgagaaacagcaataaaatttatcaacacctagtcatactgatcagaaaagagaaaaaggcacaagctactaatctcagaaatgagagcgatggtattactacagattttacagctattaaaagaaaaataagagactattataaacaactttacaacagtaaatttgatgactagaaaatgaacaaattccttgaaagacacaagctaccaaagctaactcaagaagaaatatgtaatttgaatagttcactatctattaatgaaaatagagttgcaatataaagccactccagtctcggatggtttcaccaaacattaaaggaagaaataataccaattatacaacatctgttccagaaaattgcaaaggtaggtatgtttctcaactcattctttgagaccagaattacctaaaaccaaagtgagacaaagatattacaaaataggaatagtacagactaatgtctctcatgaatggagatgagcaattctaaaaatattttaacaaattgcatccaatactagacaaaataggaaatacatcatgaccaagtggagtttctcccagtaacgcaagattgtttcaacattcaaaaattaatcccaatattaacaaaaccatatgatcatctaaaagaaacaaaaaagcatttgacagaatccaacatctattcctgatataaacacaacaaactacgaataaaagagaccttcttcacctgttaaagggcacctatgaaaagcctacagctaatatcacgtttaatgatgggagccttcgtgctttcccctaagatcaggaaccagacaaggatgtctgttttcactacttctaatcaagtcagtgcaataaggcaaagaaaaaaaaaaagctatctaaatgtgaaagaaagaggaaattttgtctttattagcagacatggaactagaaacacagctactagaactaagtgattttagcaagtttgcaagatataaggctgagatacaaaaaaaaacctgtattatatttccatatactagcaacaattaatcagaaattgaaattaaaaagcaacaccacttataatagcacaaaatagaatatacttaaggataaatctgacaaaatttgtgccagacttgtatactgaaaactacaaaactatgctgagattaatcaataaaaacctaaaagaatgagaaacatgccttgttcacgggttggaagactcaatattgctagtatgtctattctctccaaattgatatttagaattcacacagtcctaatcaaaattgcagcaggctttgtacaagtcaacaagcaaattataaaattcacagggaaagatagaggactgaaagcagataaaacaactttgaaaaataaagttggaaaacttatgtcacttaagtgttttcaaaacttattattaagctacagtaattcagacaatgtggaattgacatcaagatagacaagcagatcaatggaatccaatagaatccagaaatagaaccacatatccatgatcaactgatttttgacaaagatgcaaaggcaattcagtggaaaatggatagcattttcatcatatgcaaaacatgaactcaaaattgatcataggccaaaaaggaaaattaaatccggtaacacttctggaagaaacataggagatccttgtgactttggattaggcaaagcattccttcaatatgacaacaaaagcattaagcataaacaaagaaacaaaatgataaaatggacttcatcaaaattaagaactgctttttaaaggcactgttatagaaatggtgggaattgaacaatgagaacacatggacacaggaaggggaacatcacacccggggcctgttgtggggtgggggggagggatgagggatagcattaggagatacacctaaagttaaatgacgagttaatgggtgcagcacaccaacatggcacatgtatacatatgtaacaaacctgcacattgtgcacatgtaccctaaaacttaaagtatagtaaaaaaataaagtgtgcaaaataaagattgaaaaaaaaaagaaatgaaaattgaagccatgagctgggagaaaaatgttttcagatcacatatatgataaaagatttggtagccatatcacgagatttctcaaaatacaataagaaaacaaaaggccaggtgcggtggctcatacctgtaatcccagaattttgggaggccaaggagggcagatgacctgaggtcaggagttcaaaaccagcctggccaacatggggaaaccctgtatctactaaaaatacaaaaattagccggctgtggtggcacacgcctgtagtcccagctactcaggggtctgaggcacgagaattgcttgaacccaggaggcggaggttgcagtgagccgagatcgtgcccctgccctgcagcctggcaacagagaaatactctgtctcaaaaagaaaaaaaaaaaaaaaaacacgaaaacaaaataaagcaagaagcaataaaatatcgatgagacatttaaaaagacatttcatcaaagaacatatatggatagcaaataagcacattttggtttttttttttttttttttttttttttgagacagagtctcgctctgtcgcccaggctggagtgcagtggcgggatctcggctcactgcaagctccgcctcccgggttcacgccattctcctgcctcagcctcccgagtagctgggactacaggcgcccaccactacgcccagctaattttttgtatttttagtagagacggggtttcaccgttttagccgggatggtctcgatctccttacctcgtgatccgcccgcctcggcctcccaaagtgctgggattacaggcgtgagccaccgcgcccggcctaagcacatttttttaaatgctgaacataattaggcattagggaaatgcaaccaaaagccggtacacgctgaaagtaacaacactggtagtaccaagtattggtgagaagagagaaaaaccagaactctcctaggctttactgggaatgttaaatgatacaaccactttcaaaggcaatttggcagatccttaaaaagttaaacttacaccttccatatgacccagccattctacttctatgtatctatatacaaaagaaatgaagacatatgtccatacaaagatgtatatatataaatattcataaaaactttattttcaatagcaaaaatcttggtaacaacgtaaatgttcatcaacaggtaaatttgttcatcaacaaatcatggtatacctatacaaaaaaatgttacttaccaataaaagggatgaactattgatacatacaataacataaatgaatctcaaaataattgtactgagtgacaggagtcatactacaaagcatagatgatgtatggttccatgtatgtaaatttctttaaaaatgcaaattaatctatagtgacagaaagaagattggtagttgcctgagcagatcagtggttgggatgggacggggagagggagaaggaagagtgagaaattacaaagatgcaagaaggaatttgggagtatgatagataggttcattatcttgaatatagcgatggtttgtttcatggaaaatgtgtcagaacttattgtagaggttaaatatgtgaaatgtattctgtgtcaattaaagtgttcttcaaattagaggtggaagtgagaacaaaactcacagatgtatacctttcagtcctgtggattaattttgcccaaacctgctttggaaaacatgatccctaaatgaatgtggcctaacagatatatcctggcttggtcaaatttaagtaagagctgtaatatgaatggttcatgtaactgttaactgtcagtcaaaaacagagtcaggattaaccactgttcagtccaactcattaaagaaataataaagcaggcagcagtcagtggtggtataaacagtgacataagtgagagtacaaaccagtgtaactttctagggaccaatttggaagaagtctcaaaatgtgctcaacttttatctcaacagtactattgttaggaattttaaaaaatatattaaggatgtgagcaaatatttagtatatccaaaacagcataatatatattattagcaatctattatttgttaatagaaataattttaattactcaaactgtctaaaattagattcaattatagaaatccagccacacagtggaatactatgcacatcaaattgatgacctggaaagatcttaagggaggtttttcataagggaagaaataagctactgaaggatatgattaacttgtagtaaaatgcttataaatttctatttgcatacacataatagggaaggatgtatatcactattaacagcagtgattgctgtgtgttggaattgtgggtgacttcaatttttttggagactttgctgtagtttccaaattgctgccacaacgcaattttatttttaggcagaaaaaaattaatgtatatggaggttctttcttaactaaggggtgtgcttgagctgtgtctgagcacatatgattagttagaggactcagtggtgtgttgcgtaagttcctttggtattttgtgtgtttcagagggaaaaggaatggaaagaacagcatagcaagcttcagatatttgcctcctagctcagtcctaaagtgcattgctgagtccctgaacttgtatctcaggcttatggaaagatgagaaggagctgtcttcattacaaactgtgtgagacagggggcatgcagggctgtctatgtgacagtgacagaagcagatcactatttcagctgcacatgagacacagggtggctgcagctttactctatagggtttgcccttggctttgtgtgcagtgtcacctgggcactagtcccctgttcagcctggcagtggtggtgggcagagccgggcggatggaagagggctggctcctgaagccctgagatgctccataagatcccctgaaacaatgggcacagacttaggtgaaggcagaggcaatggcaggcaccccaaacactccaaaaccagcatagccttcccaggcccaaatttcatgcatctgcggcctcagttattctcaatggctctggaactttcagcaaagactttcacacactatccagtgcacacgctttattttggcattcaagccactgcaccaactaggtcacagggaatgttaattaaggcaagataggtagaaggaaaggagggtatgtacagcaattgctcctctttacggagaagagaacctgccacagaacaagatgcagttggttttgtggtgcctgatgaagaaaagaaaagggtggtctgcacagaatcttggctccattctgctgcaccgggaattcctgaccacagcagtggctgcggcagcctctgtgccttcctcattgacctccacgaagcacttgtgggcaaccttggacagaggcacattcttctcagttgacattccagaaaagtctgccttggcttcgtcaaaagcatcgatcattcctaatcttcgaaggaaaggctccaagtcataactctcctccagctttaatctgggaaggaaaacttgaaccttactttttgtcaacttttctgaatttgtccaggctttgaatttctcatatgtaagtgctttttccacctaggataagaaagactcaaaccttaaaatttagatgacaatagcctgatacccacacacccatttattacccctcccccaatgacatgcaattagatggtgagttctggtccaagaaaatctacagatattttcttttataaacacaccaagattttctcccaaattttcatcttttcacagttttatggagacaagtgtaaaagagctagtaaacacctgagacaggcagaaatttttaataaaaacaatttgtacctaactcctttcaaatgttaaaaacattttttaacagtttagaaaattctaaccaattcattacattaatcttcatgcaatacatactactgtgagtgggagagattgtttgacaaaagacaaagagcatggctcagaactctgcttctgagtctaatgaggggactattcagggttaaatcagagggcaactcagagtaaaagagagggaattgtgtttcatctgaagatgaagggaggcatgagaagggagcatgagacgagaaatggggaatgcaagaagacttcatcagcatccttgtttgtcctctgcctgtcctggagttagcttcaaattcttcaagatccatcactctttctatttatcaataaggtagaaagaaaaaagggagaaaggccttccactagcatctccccttccctttaacaactggagcccaggtgggtactcctctccaacgagcattgttttgattttgactctatttctagactctcctaattttctcataagtggccacaacagatgtcatccctgacttagggcagtagctttctgattccaaagggaagccaggaaaatcaagcagcccaccctcaacatcctgtgcattggtgtgccagagctgacccctatcaattgttaaaccctcagtagactaaagtcggccatggtgggagtatttaccatgtcatgagaatcagcaaactttataaatgaaggcttctcccacctcccagagctggtttacaagtgcactattagtcttgcacctcctaccttgcaagtttaccacttcccttcctggactctgttccttttctgtcacagtaagacttttctctcctcttgtataaggtaaatttcccacctgtactttagacttttgctattcatagtgtggttccaagcatctgtatcacttggaatcttgttacaaatgcaacatctcaggccacactccattgaatcaaaatctgcactttaacaagatcactagaatcatatatgtgcattagtgtttgagaatcactgccaagattgatccctacccttcttccaggacttttgtgcaataatcattgggctttcaaatagaccttccatgcagaataaagaataatattccaaataataatatatttagaactctctcttcttagcttcatcaaaacttgtccactcatatatgtatacactcaacagaaatgcatgaacatgttcatcaaaagacacacaatgatgttcacccagcactgcctgtaataaccccaactggaaactcctcaaatgccaattggtagatgaacataaagaaatgagctcagctggactccacagatactcaggctcattgcctggagcttaccacggcgaggtccgtgttgtcatcgggaagcagaatgaccatgctcagctcctcttccacatagggcagctccaggacctgggtgtgtacctcatccgcataccccattttaaacttagcttccttaaacatcatctgcactgtctttttttcctaacggaaaaattaaagttcgattactgaaaagtgggtataatttactaaaaataggatatatctaactcacagaaactctaggtgtgtataattactgtttctgcacatttatgctgatagatataaaatcttcattagtacatcttagtattgaatagaacaagctattgttccagcagatcaaatattaccaggtgagaaaaaaaaaacagtttggtaaatggagaaggacacaaaaattgacattatccttggaagaagctgtgtttgcttttttgagaacattcacagagaagctttctcatggaagcttccaactaaaaattctttatcgaagttaagataaatattcaggcccttgggctgaaggatctggttagaaaagatgtacggtccaaactctggaaagttgccttgttgtagaattggttttatggccttggctttcttaggaaggggaccttgaagagatgtgtaaggtctgctgtttttaaagcctgcatcaaatatatttttaactttcatatctttgtgcaatatgagagtatcatatttgatggatgtcaaatcccaagctaacaactattgataccagccattttaatattcaaaagggaaggtaaagttaggctttacatctgctaacttttttttcttgtgctcaggattgtataactttgacttttaaggcaataaataggcatagttgccactgatattgcaaaaaggtatctaactaaatacagagagtaatagcatcatgcaaacataattccaaggcttagaagaaattctcctccaatccaaatcatatgaccagagatggaaggtagatttgatcaaagatggaaaaacaaaactatcaataccaaaattatttttgtttctctcttccttccgccattaaagatacacaggaggcattaaattcattcagaaaagaagccaggcacagtggctcctgcctgtaattccagaactttgggaggataaggcaggtgtatcacttgaggccaggagtttgagaccaacctgggcaatatgacaaaaccttatctctacaaaaaatacaaaaattagccaggcctggtggtgtgcacctgtagtcacagctacttgggaagctaaggttggggaatcatttgagcctgggaggtcgaggctgcagtgagctgagattacaccactgcactccagcctgggtgacaaaaagagaccctgtctcaaagaaaataaaataatataatataattcagaaatagattaaaatcaagatcatgtcaaataaattattcatttttccaagagaatatttcctgtaatattactttaagaaagtagcagtatatctgaaaaatctttccctacctcgttggttttaaagagcattccccttgtgtactttctgtcaaattgctcattccactttcccttgaaataaatggcattcacaaggaccagctttgtcaggggatcgactgtcccagcatccagtacctctgaaatcttacctataaagaatatgagagtttattgcaatttgtggggaaataagcattcttttacaaaaatccctttgacacataaggcagaggcttggttgagagacaggctggagttctgtctttctgggcccctgatgaattaggcgatggtgtttagcagtgtggcatacacagtgtaacatttgtgcttaagaaaaaaatcttgaagtaggaagggcaactatcattttgccctcaatttatggatgtagaaattcaggaccagagcatttgccagacttttgctgagtgcacacaggtgacaagtggctgagttgagaacatcaccccagagtcttgattctgactatggggcagtcaaccttggcactatcatatccaagcctcaccgctattgtcattttaagccagataattctttgttatgggggctgtcttgtgcattgtaggatgtttagccagcagcatttcttcccattttgacaaccaagattgtcttcagccattatccaatggcacctggagggcaaagctacccctggttgaggatcattgctctatgcatatattcaaacctcatcagacaaggaaagctttccaaaggatgagagaacacagatctgtcaatgggagaaggcagcctctctgaagggggtgaatggggcaaaggaattaggggggtagaatagaggggcccaaattgagttgtccaatgagagggtaacaaggtcatctccaaggtccccttcagctctaatattctgggggaaatgtgggtggtcagcctaagggaaggaagggcataagcagccctggaagagcagtgacaggtatagggcagtggggggaaggtgtggagaaacttctaggttcctcaggtgacagtactgttgaacaactggaaagaccactaggcagatgatgtatgaaaacacaaaaggctcttcccttcccatggtaattattgtattggctttcagtagaatcaggggcattacttctgctggacacacagtggttgcgacataggatggaatggatgcaataatgagtgctaggttggcccttgaaataagtgacttaattcctccaccgtttacaagtatcgaaattacttgttaggtatttaggatgctttaaagtatgactccccctttttcctactgaagtaaagaactggcagaaatatttctggtgggatggaatgtggtctgggcagggaacactgcaggctccatgtcgctgcacctccagaatagggaacaaattcagaaaaggccacactctgagagcaaatgtagccatggccaagttaaaaaggaaggagaaggctgcagatcaaactactgagctgtcccattaccacgcggaggagataacatgagagcatgaaatgttgccctctctaagccgcaacttaattgaatgccattctgtctccgagcatggaagggcctctcagatagaagattaacagaattccaaggaggagccattttccagggattttccagcacggtccacaggggaggaggtcagagattcaacattagttttagaaatcagtacttcatgatctgataagaaatgacagagttgcattgctggcctgtaaactcagcaaacacatacaaacaggcctgtggtatgcaggtcacagtggcaacaccctgggaagtcccatcccagtcaatctaagcctcgttgtatagtaattccaaatcaacagaaatgaaactgtctcaccttcagtcttctctgccacccagtcatttatatgcttcctgcactcttcagtgtcttcagcaaaggacaactcctccagctctgcctgatagaacttctgacagtattctttaaagtcctgcaaacacaaaacactgagtttagtctcatttggtaaaggttcccacaaatgcaaaagcattttgttttctcttactgcatttctacaataagtgcttggacaggtcacactccacttcaaggtgcatgcgtgcaattaacaaaaatgtatgggccacctattcttgcctggtactgggcaaggtgcttggcttgaggaggtccacagcctgagaagaggcagctgagacacccagacacttacaggacatcatgagctgccactatccacaaaacatcacaggagcatccttgtcaaacgctctccactgactttaatattgcttccctcactaggcagtctaacacacttttactcattttgcatcaccagcaccaactacagtattgtggttttggttaaacgagaggctttataagggaactagattgttaagaaatcgtgttgaactgcaaagaaggaaatagcattttagatctgggtcatatggttggttggaagaatacagagcaaggaaggccccatgggaatggagcgtgataggcctggatcatagggtgtgtgtgcaactgggttcatacgtgtgcatgcgtgtgaacatctgtgtgcatgagtgcacatgtgtacatgtgagtgcttgggcacctgcatgtgtgtggattgcatgcatgtttgtgtgtgtgtgtacatgtgtatgtgtgtttgtgtgtatcagggaggggattaagggaaacagtggcaggggaagagccttgaaatgtaagttggggtccaatcagaaaagtcctgtacccaacacattaaaacccagataacttacctcacaaaaacctggctttggatataataggcctggaaactggctcccagcctctgtccattccctgttctcaaatattttaatttcagccaaagaaagaggatatagagggaaggaggagccaagccaccaggaaaagtagaggttggctccctgtgtcccaagtattacaacagtagtagatcaggctgatgttcaaaaatgaaatggattcatcaggagattcctgggatccagagtcaccttctgaggtagataaacccagagcaggcaaattccgggaacagcacccagcagctaccaggacagggatgtatttgagccttagaggagtcctctcagaacctccagccaataggatggccaagcttgctgcaatcagttcactaattttaagacaacatcaccctgcatatcaggtggcatgatttttgaacctcactgattgcattatgccaggctggactagggaaccttggaattatatgctgaagtaaatagaaactgcttagatttaaaacctcaattttatgaacagattttcattttagaaagacgattgtgtcagttgtaggtgcaattcagaagagggcgggcaaatttaagagaatttgagaggctacctcagcaggaggcagccgaataaccacacttgggactggggaggagctctgtacagcgtgttgaatgatgtggtcactcagggacagggaattaagggggagaagcagggctgcgtgcaggagaattgacatattgggattgataacagggatgggtgtatcagtaacaatttacaaaggacgtaattcagaagtcatcataaaatctaaaattgtaatttcagaagtgtaattccaagcacgttttaagtcagtacagttatactttattatctgctcttctgtagtctaacttactttcaatttctttgtcatcaatatgtgaatactacttactggaaggaaatcacacgtcttttctccaaagagtctgttggcagttctaagcaagtactgagtgccagttctgttaacttcactgagaagtgactggaaacctcggtgaatatctccgtctttgtataaacaaagtgcctgggaacagaaaccaacactgacttttaacgctgccattatactctcccaaagagctttctccaaacaaacctctgtactaaaaaaaccacacaggatcctactttaaaaaggtttggcctaattgtctagcacagggtttctcaacgtgggcaatgcagcattgacatttggggccaggacacttccttgtctcatataagcattgtaggatttttgcagcacttctggcttccatccactagatgtcagtagcacctctcagttatgggatctaaaactccaggtcttcgcaagggtccccaggaaggaaaaattcacccaccgacccctacctcccacccaccaggtgagaaccactagtctagcaaatttattcatgccagcaaggcagtgtgcgataattcagggggaaggcagaacagaaaaaagtaagtaactgggatgaattacaactcgggtaatacaaacaaaagcagcaataaaactaaaaatgtttcatctgcaattttacagaagttctccagaccatattataaattaaatgtcaagtcagagtgagaattaaggttattcctatatctctcgatcacccccagtccaaagcctcactcctccaatcagttgaaagaaacaaccacagaaggatgtcaactggggtccctgggtgcattttaggagactgtctatacactcctgatattggtggcaaaatgatatccatttggcaattatctgggacatcttcaccaatagtcagagaactgttcctaaagcattatcccacacctcgtttgtagataaggtcatacatcaccattttgaatcaaacagattatatattcctcaaatcactccagaagatataagtccacacttgtgttacattcctcttctaggatgcataatcatgcactaaaataacccacttaacaaaaagttaatctacgcacccacatgtctattaaaaatataatgttagcaaaagtttaaaatgtaacaaaattggaatattttgctttcttgtgggacagaattatactttatcctacttatcaaagatgtgaatttgccagactgtattgatgatctgatctagagaaaataactctatggcttgacttctcccataaacatcagaggagatgatctgtccaacacatttcacctttctacccctttctgctcttctccactgccgagctgctcctccttctacctccagctccacaggcctcagctagagcaaaagtacagaaagacagctgtatggaagcacaagggaaacacactgttctccttcctttgtgacaagcacacatacctgggacatctgggctgcagtgcttccctttgcccccatgaagaccatggccagggcagaggagatgctcatgggagagaagaatacgtttcttgagttgtcctcttcccccaatattttaaataagctgatggcaaaagtgccatttgcttcacagaggtcatccatcagagaaggtctgcatcaaaggcacagcagggaaaagcacataagccaatgactccggtagccacgcagtcattcatcccccagtcagtggacgctgaggtggtaggtggaagaaccaccctccaaagacttccactcctaattcccaaaacctgtgactacatgatctgccctggcaataaggactttgcaaatggtattcagttaagtattttgagatctgagattatcctgagttatcccagtgggcttaatggaatcacgagcgtccttaaaagagagaggcaggaggggcagagtcagagacagagacatgaggacggaagcagaggtcagagggataggggccactgatgaaggaatgcaacctcctcgagaagccagaaaaggcaaggaacagattttcttctagagactccagaaaataacattgctatgctgtaccattttggacttaggacttccagaaccataagataataaatgtgtgtcatttttcagccactaaatttgtggtaaagtgttatcacaccaataggaaacaaaaacactggtttattcataaaatagccaatctcagggcctatgacttgtatccctcttagcaacaggggcacagacaccctgcaacacctgcttacttcctcccttggtatagcagcagccaaaaggtctttgtgcggacgggtgtggtgcctcacacctgtaatcccagcactttggaaagccaaggcaggcagatcacttgaggtcagcagttcgagaccagcctggccaacaaggtgaaaccccatctctattgaaaattcaaaaattatccaggcatggtggcgggcacctgtaatcccagctacttggaaggctgaggcaggagaatcacttgagccccaggaggtggaggctgcagagagccgagatcacgccactgcactccagcctgggcaacagagtgagactccatctcaggaaaaaaaaaaaaagatcttggtgccaggcactgttttcagcactttccattatcacccaataacacattgaggtcagtatagttattgccccactttagagatgagaagactgagtgaggtttagtaactcattccagaaccctcaggtagtcataaacgcctggcacccacagtttgattccagagcctgaattcttaatcattacacaaaatccccctattgctgctaattatctttcagtttaatgtctccaatataatctataaagaatgttctaaaacttatatatgtaattctttatcaataaaaactgtatttctgtcatcacttcctgtgaaaacagctagatacatttcaccaaatttggagggtttgtttgagataggctggcctgaaatatgaggctactggaaagacaaaaaaaaaaaaaattactttttaaagtgactccaaaaagatgccccattttccccaagagttgctgaaactgggttacggagttgcaaagaaagtccataggcatggatataaaatatgaagccctaatcttgtcatcgagggagcacttttaattagatgcattgatttttggatcctcctggctaagagggtcttaacattcccctcagcttgaattaactttagacaacctaaacttgactaaataaacaaactaaacaggcttcctcctgcctctaggccctttcttcctttttcttaaagcattttatttagagaacttgtcattgtaaattctttatcagcccctttgagatgtaaatcttttaaaaaagcttcttgctagttttacatcccaggacagtctctcaaagacctggaagccatccttttgaaatgtaatcatcaagaaagatagcatccctatcaaccagttctgtggaaggtaggagcctaatctaggggggcaccttgcttaaagtgctaaaaagctattacagtttactattattataattttagtgcattattataagtcctacattgttgtttatatctattaaaccctataaaaacgtgggctatttcataaaatattgcagttcaccaactcatctcaatttccctcagcctttttgttcttacaattgagaacatttgggaaaataaaaggacaaatcattatctataatctcatgatcctacagatattttttctattatattatcctttttttcataaacatgtataattttaactgaaaaatgtagtcaaacaagaaaaatatgctccagtttggaaaattagcaaatgagcaaaatgaaaagtcctggaaactctatctagagatataaattatcgtgcatgtgttcatttctataaacagatggagcctcatccagtttcccagcggcctacaaagtgcctgttgcagcagctctgaaactgtatgcccttagtgggggtcttggacaggtcttctgggtctcttagagcacaggaggaaaggggaattgagtggctgagacaaggaagtggggaacaactgtattaaccaaagtatcttcactgttggatgttttgcttcctcctaagatatttcgcttcctcctaagatatttttcaacagaagggtgtctcttacttaaacaaaaaagtgagcttatatatttttttaaagtgtaaaggcaacactctaaatatagaacaacagtctaaagcagtgcaaattctttaaagtttaaaataaatgttagtgcagttcagaaaaaaacaagtagggttagggttatggttagggttcagaaaactaagtaaaataaatgtgaaccaagaaaacacaatcatgacataatttgcacaacagtactctatacttaagaggttgtttattatggaacaaaatattcctgtttctcactatcctcacatcataagacctctccagagcttatactagggtctgcagatgttggaaggcagagtagtatgtgcaggcaagtcccggggtcctccacaacctcatctttcactcgaggacatttcagagactgggaggcaggaaggaatattcagacttcatagaactgggccaaccagaaggtggcaccaaagaaacttaaagatggagagaattgggtaaactgggtaagacagagacacaaataaatttggatttgatccaaccttagcataagagctttggactcagggtgaagcaagcatgaacttaggttggggtgtgtgtgtgtgtgtgtgtgtgtgtgtaggtgtgtttaatcatcctgtctgaactattgaatcaatagtttcaatagttctgaatgaactgaactattgcatcaatctcatctttacattttaactgctcttagttgcaaactgctacttctgatttcttccatctttcctcttccttcatctcatgtccccacttccattccttttcaacactcaggtgctggtcagtatgtggtatttcccatcaatatctaccctgcagccacaatacatgtgcacacactcacacacaagtgcacccccttggcctctgctcaggtcagaagtcaggcaggggagaaaaccaggtaacagaatgactcttccccctgtcttcctggtgttccaatctcatttggactttatagcttttgaaagggttggaactttaaacaaaatggactttacccaatatttctaaaaagcaattaattttaatacaaaataatactttaggtgccaatgccacaattagattgtgttataaaaacacaggaatcagaagtttttatttccagccaaccaaataaattggcattaaactagtttttccttttcaggcaaacaaacaaagacagaggcaattaaatactgtccacaggactcacagaaaaagtgagagtcagcctcaaaagcaagccttacgtttccaagtatatgatattgtcctcctcctgggagccccaaatacctacgaactacctcctccactcccccatccccatacaacatccaaaagtgagtttattcaaagagcatttatgtagaatgttcactacctgttttgggaggagaaaatgaaaaataaatgcgttaatcactgcccagaagcttacaccctaaagaagacacacatatggaaatgcgtagtttcaagccagtcaggtgctctataacaggataattttgaaagtgctatggaaatcctcagaaaaaaacaagtaaataaataaataataagaagaaaacctctacagaatcctggaaagactttccagagaagctggctttaaaagctgggcaggccaaggtaatttatagattcaatgccatccccatcaagctaccaatgactttcttcacagaattggaaaaaactactttaaagttcatatggaaccaaaaaagagcccacattgccaagacaatcctaagcaaaaagaacaaagctggaggcatcacattacctgacttcaaactacactacaaggcttcagtaaccaaaacagcatggtactggtaccaaaacagagatatagaccaatggagcagaacagaggcctcagaaataataccacacatctacaaccatctgatctttgacaaaccggacaaaaacaagaaatggagaacggattccctatttaataaatggtgctgggaaaactggcatatgtagaaagctgaaactggatcccttccttacaccttatacaaaaattaattcaagatggattgaagacttaaatgttagacctaaaaccataaaaaccctagaagaaaacctaggcaataccattcaggacatagccatgggcaaggacttcatgactaaaacaccaaaagcaatggcaacaaaagccaaagtagacaaatgggatctaattaaactaaagagcttctgcacagcaaaagaaactaccatcagagtaaacaggcaacctacagaatgggagaaaatttttgcaatctacccatctgacaaagggctaatatccagaatctacaaagaactcaaacaaatttacaagaaaaaaacaaacaaccccatcaaaaagtgggcaatggatatgaacagacacttctcaaaggaagacatttatgcaggcaacagacacgtgaaaaaacgttcatcatcactggtcatcagagaaatgcaaatcaaaaccacaatgagataccatctcacaccagttagaatggtgatcattaaaaagtcaggaaacaacaggtgctggagaggatgtggagaaaaaggaacacttttaaactcttggtaggactgtaaactagttcaaccattatggaagacagtgtggcgattcctcaaggatctagaactagaaataccatttgacccagccaccccattactgggtatacacccaaaggattataaatcatgctactacaaagacacatgcacatgtatgtttattgcggcactattcacaatagcaaagacttggaaccaacccaaatgtccatcaatgatagactggattaagaaaatgtggcatatatacaccatggaatactatgcagccataaaaaaacgatgagttcatgtcctttgtagggacatggatgaagctggaaaccatcattctcagcaaactaccacaaagacagaaacccaaacaccacatgttctcactcataggtgggaactgaacaatgaaaacacttggacatagggtggggaaaatcacacaccggggcctgtggggtgggcgggggggatgtgagaggaatagcattaggagaaatacctaatgtaaatgactagttgatgggtgcggcaaaccaacatggctcatgtatacctatgtatcaaacttgcatattgtgcacttttaccctagagcttaaagtataataataaaaaagaaacaacccaaatgtccatcaaaaacagaatggataaatggattgtagtatattagtataatggaatacagaacaataaaaactgaaagaaccatatctataagttctttagtttttgacatggacaattcccacaaataatgtattaaaggattaagccacagagtaatacagtattattccatatacgtaaagttcaaaaccaggctaaactaaatcattctggatgcatgtgtagacagtaaaactatgtcgttattatcatgaaactcaggaaggtggtgatacagaggggagggaagcggatgtgatgagggaggagggtgtgatcagtagggaaacacggcctccagcgatgacaatattccagttattaaactgggtgatgggttgtactgctgttctttataattcaatacacattttaaatgttcttttgtatttattcaataggtaatgaaacttattaaaaccacatatcaaaaaaaaaaagaaaaaagaaaagccgggcaggcattccgtaggtggtgaaatgggggatgcaaataataggctgaggaattagcaggtgccaagaatgtggcaggaagacaaagggcatggtttgtgtggtgcccctggggtgggtttctatggtttcctgtgagccacgtggtagtgagataggacggacccttatgccacatttaggagtttgaacttgagattatggtctggaaagccatgcatggtttttaaacaaacgtctcatatgagtgcattggggctttagaaagataacccggctcagtatttggtatgaaaagaggctggggagctggcgcgtaggccaccaccatgggccagggactgctgaaagcagagggattgtctgcaatagagaagtgggggctggaattgccaggcagtgactgctcacatagggacagagcacaggagggcccagtcccgaggcgcctagctgttataaattcatactcagggtgggtcgtgaaccactggaattttaaatgaggagtcaggctggaatggggaatatgacttgttccatttgagatgcgtggaacacaccataccaggtgaacctgtaacaaagacagccaaggatgtttgtaaacagttagggacggggatgagtagactgtctagagccagagacctggagccatcagcatcccgattccgagaggttccatgagaatggatgaaactacacagaacatctagtggaggcacaagggaagaaatccacctatttctgtggaatttccaatatctggaggtagtaaaaggaagagacagaggagggcgaggggagagcgcgcgcgcgaaacggagactgagacccagccatcagggtgtgctgggagaactggggagacgagtctgcccctgcgagtggacccagggaagagggcgcggtctacgcagagcccgaggcagggaagcgggaggggcccggagagcagccctgggtgaggccctttggaatggagaggtctcaggagtgaagcagcagccagaggactgagagtgtctggaaagtgaggaattggttaaagtaacgccggtggctgcaacagagaggggcgtaggtgaagaagcacccccaaccccatcccatttgagaggaagcagacaatgaagaagagaatatgaaagatacagaaagatgaaggcaggggtggaaagaacggaggggggggacaggaagggaaggagaaggtgcaaccaataggctgtaagcacaggggcaagcttgggcgccaggggagcagggactcggcgcctccccgatctgccccaggcgccacggaaattccaggccccgccacccgcactcccggagcctcctccgcagcggcggctcctcccactcgccctcccggggctcccgcccaagcttccggcgcttccaaactcactgctcgcgtcaccccccgctcccatccggcagcaaatcacagcgcagcaaatcgcaagcctagaaacagacgctccctctccaggggcagcttcctattcagggcgggtctgggcgcacctgttctcgggacccggccctcggccttcgccgggtctcgcggtggggcttgggaccccggctggtgccagggcgacccccacagccccgcgactctctttcccggccgcctcccgccgtcattctcctagttcctgcccgcctttgcctcgctctgattcctgctctggccttcctcccttcccctctctcacgcactccagggaagaggtggcctccgcgggaacctgggcacctccgtgcctgccccgcccggtacctggcagaggcccccacctcctgctgctgctgctgctgccgccgccgccgccgccgctgctgctttgactattcctcctttgtagatgcttcacgtccgccttgattgagggcaaggcttccggcagatgactcagaaccgttcgattgctctggcttgtgcaatccctgattctttgggcctgtgtggatgtctgtgggcaccggagagagggccagtgcctggtccttggagggtggtttttataaaaagtgtacacattggctattgtccttttttcaccgttgattcacgtttgactccactgtagttagacgtccacccaaacattctctgaaattgctcctgataaggatactaatcattttctaattgccttggccaaaaaatacatcccaggtcttatttcattttgtttgttggcgacatttagccctttcttctttgaccttcccaggatttccagagcacccttcccttctttcctgactcctttgcttggtatcctgattcctttcctaccattctaagccctcttcttttcattataatatgatcttcttgtatgacctccactatatccataggttcatgtttcaacttttaacttatttcttcaaaatctctaacctgtctcgagccgtagatgttacctgtgtactactggacatctctcagaaacctgggtgtgtccctccgcagttcttttaactaaatgatcaacagtcctgttacttctatcacttttgtgttcctcctgtccatactctgtcacctctatcatgtctcatgtctctcctaaacaattaattttcctacctacagttctgatccatgccaacctattgcctactctgaagttcaggtaaacattccaattctaattattttatacctcagtttaaaatcctttataacatcctcttatccaaaaagataaattagaaactattgagcaaggagtgtaagcctcttcacgtcttgatttctcccttcttttctttagagccatagcaaattatttacattccttcatatcctctgttcatatacatggggttcctggcatgcaagcttgtctttcaaaattcagttcaaataatgtctcctgcaggaagctctcacagagctctccagtttgggaattctgcttttaaagatgcacattcccactctgcaccccaaaccaattaagtaaagatctcttggaggagggaacccagcagcagtattttgtaaaactcgctcagtgatttccctgtggaatcctaaaagtaactgttcccaagaactctcctcaataagtcttggtgcaggattcacccccatcttttctccatgactttgaaacccctctctctagtggctacagactcacatttgaactgtgcccaaacttaccggctctgccagttgaaaatgccaaggtcacttccccattgtgcatcaatttctccttgttggtcagaactagatccagactttgggccccactttgtccatccactccttttcctctttgaccagcaaaacagattaaaagatgaaaaatgcttgttttcctccgtgaaacttccagcaaatgcctggtggtttgaagtcctttacaaaggatataatttggcccctgggagtttggttgtaaacacagatatcccatgtaggaaacacagtgcgtgcaggtgcaaagaggcacaagatagcaccatgaaaaccatgacgtatccaggcctgcagtggtacagatagtgtggatgaggcactgcaagacaacgtctgatgtgtccacagggccatgtcgtgaaggccatgtggacgctgttggtggtgtttcttcgttcccttgtggactatggggaaacacaaaaggattttaagctggggagaaacataatcatatttgtatttacgaaggtccctctggctgcaacatggagtatattgtaggagggtaccattgcctgcagtgaggcgttaaggacgcagcatggatgagagatgaggaaagctgaaatgaaacagaggcaggagaaatggagaggaggacatggccttgaggaatttccaggacataaatttggcatcacttcttggaccatgagaggaagagggagcaggaagaatcaaagatgaatccaagaatgaacaaatctaatttttgaaataatgcaatgaaaagtagaactggtctgttttcctaggtaaggaatttgtctgcaagtcgatattcacgaggattaattgtatttattttctgagtatggacaatttaaatgctgggccctgaagggaaacccatctctcagaataactaaagcccaatttcagagtgagcctgaacaggctccccactccaccctggcccactggggacacaacaggtaactgataaggttccagagtatataattcagtgcctcagaaactgtcctcagcctcatcttctgtcttcttgcctcatacctaacttcacatctcttcagtcagtactagggagtatctgctggttctcaactcccgactcaaccttgacctagttttgtctgactccctcggctcctgactttgtggacctcaggaagggcacactcctaggctagtctcaggttgagctaccaccgtctccaaattagacttccacttgtcaagaaggaagtagagtccaggcataattggagcttcctggggtgattcgaggtctctgtactccttgctgtaaaatgcacaaatactccaccttaaagaatctcacggggcagggcacagtggctcatgcctgtaatcccagcacttttggaggccgaggcgggcggatcacctgaggtcaggagttccagaccagcctggccaacgtggtgaaaccccgtctctgctaaaaatacaaaaatgagccaggcgtggtggcaggtgcctgtaaccccagctactagggggcactgaagcaggagaactgcttgaacctcgggaggttgcagtgagttgagattgtgccactgcactccagcctgggcaacagagcgagactgtctcaaacaaacaaacaaaaaacaaagagtctcaccggagttccaaaatatccttcagtgactgaccatatactctagcaaaagttacttcatatatgcccggccacagctctcaatctcccatgagattcccagcaatcttccctggttttgagaaagtgtaaaaaaacacaaaaagcaaaaacaaaacacacttgcttcagctaattaatgctagagaaacaaacatagcatcataaaatgtaagcatttgaaagaaccatattgttgacgctgttccttatattttgcaggagaggatggtgaaatagaggtagtttgtgtgatttgcccagagtcccatgaagaattcacagaagaattgagactacagtcagtatggccacattcccagagaactgctttttctgccataccctgtggtaataatattgtcacaagacaattggacagtgtttcacatattcagtgatggaagaagagtttaattgaaataaataaatgtcaggaaaaattaattcgattgtgataacacttaaggaatggagtgttcactctctaggagaagttgggctaaatgatgaaatggagtgtccgtgtatgtgatctgtggtgctgttttgctgtagttaattcctatttttaacttgaaatgtgttctgactgcgttagtgccaatttttttgagaccggtgtacctatcctatcaggtacattcgatttacacaagtacattctcttttcagttctcccaccacttctctttattcaaacaattaaaaccttcttgaatattatttggttagtcctttgagttaatgaatcaattttacaggatctgcttctgtcatttttcattaacattccccagacaaatttgtactgcttactaacagcacaatcctaaattcaaaagattactgagttataaagtggatgtctggacaatccaaaacataatggctgtggtttgggtgtggatttttgtctccacgaaaacccacactgcgattcagtccctgctgtgccagtgttccacttagggagaggtgtctgcgtcatgtgggtggatcccttgtgaaagccttggtcctgttctcctggtagtcagtgaggtacaattagctctcatggaatggattaattcctccaagagtgggttgttataaagtaaggtttctccccatgtttggtccctcttcgcatgtgcctgcatcccctttgacctttccctcattgaacctgcaggttcaatgaaggttcactgcaacctccgcctcctgaggttcaatgtcttttgacatagcacaaaagccctctccagaagcctggggatgccagtgccatacctcttgtatattctgcagaatatgagccaaataagccttctttctttataaactacccagcctcaggtattcctatatagcaacacaaaacagactaagacaatgcttatatgaaaatgtctagattgttaccaagacaaatgtaagcaatgaaacatacatgttgtagagcctctgctgatcaagggtatggagaacccagtggaccttaatgtgaaaagcattacattaatatgcctggtattgtatttcaaggaacttataaaagaaaaaaaggctcctgatatggcattgcctggaaactgccattagtccctcattagtgaatcgtcagtctctccattaatttgaagggggttaaggggaagtattaagtgacaaagaatttggagggaattagaaagatctctttggtttctaaacgtatcttttcgtgctttgattgaatgtgttgcagataggaaagttgaataggagatccctgatagcctctcagattttagcttatcaatagagttaccattgattgttgaaacagtgtgagttcctgccacttgttctagtgtcctgtctggttcagcattaatctcagaattttcagtttttaatggagtagtttttctaatagctgcacaccctcaagccagaatgtgtttgctagatccacactgtggacttcagtctcctgccacactctttcataatagtgggagagatgcttattcagttacatcaggcagtgttcactttgcaaacaaactacatcagagatttgaagagaagagaattaatacaaagaattattaagtaatagattttttaaaaatactgtaatggcagcagatgtagaaggtacaaaagagaaattgtcacttcatgtcttggggtaagtggaaaaaaaaagaactaaggacttaggaaaagacataggtcatagactgtattatgtcctcacaaaatttttatgtaaaagccctaacccctaagatgatagtttctggagatagggcctttgggagttgattggggtaaaataaagtcaggagggttgggccctcttgaagaaattagtggcattaaaagaagaagagataaattgctctccctgccatgtgaacatagctaaaaggtggccttctgcaaaccaggaatagagccctcttcagaaaccaaatctcctggcagcctgatcttggacttcccagcctctaaaactctgagaaatgtcagttgcttaaactgcccagtctatggtattttatttttattttttgaatcagtgtctcactctgttgcccaagctgaagtgcagtggcatgatcttggttcactgcagcctctgcctcctgggttcaagcgattctcctggctcagcctcctgagtagctgggactataggcaggtgccaccatgcccagttaatttttttgtttttgttttcagttttgtattttcagtagagatggggtttcaccatgttggccaggatggtctctaactcctgacctccggtgatctgcccaccttggcttcccaaagtgctgggattataggcatgagccaccacacccagcctatggtattttattatacccacctgagcaaactaacatgactgaatgtcccaaggctgatattcagagctctttgaaggtgtggctgccacaggaacatgcagtctgcagtggctatgaaacttgtcagatggccaaagctggcttacgagaagccatatgtccttgctggagggtgtgggcaggctggggctggaccatagaagcaaatgcctggtagggatatagttgccagaggttgcatcttgaccaaatgcagaaatggccattgtgtggagaaagcattccctgagaatgtggctacagatgaccaagtgagctgctgggtgcctacactgaataatcctaagaagatcagaatccagaaagtgcatttctacttctatcttcttacagtgtctctccagctccctctattggcaaagctgaacactgggccagtcagtcaagttcttgttacaggatccaggtttactatcacaaagtccacaaaggtagatttagagctgatagacaataaattgatatctggcacagcaatgaatggagttctcaggcaagcctgtcattaaatctggatgataactactgaatctgtctcttttcctgatcctctccagaatccttcatctcaaggacaatatctaaggaattcactggtaaaacattttatgcttggtcacaagcagctagagaaagcaaactacttccggcctggtgcggtggctcatgtctgtaatctcagcactttgggaggccgaggtggtggatcacgaggacaggagttcaagaccagcctggccaacatggtgaaaccccgtctctactaaaaatacaaaaattggtcgggaggctggggcaggagacatgcttgaacccaggaggtggaggttgcaatgagctgagattgcaccactgcactccagcctgggtgacagagcgatactctgtcttggaaggaaggaagcaaggaaagaaggaaggaaggaagcaaggaaggaaggaaggaagcaaggaaggaaggaaggaaggaagcaaggaaggaagcaatgaaggaaggaagggagagagagagaaagaaagaagagagagagaagaaagaaaggaaagaaagaaagaaagaaagaaagaaagaaagaaagaaagaaagaaagaaagaaagaaagagaaagaaaagaaagaaagaaagaaaactacatctgaagtcaacactagtattggtgggagaggaattttatgctgcattccccaacagccactagatacgccaatcaggtgtgcatggtccatgctatgatctgtgagtatcagatcaacgtcagcttgttcagcaagccctcaggactggaaacctccctcaagtcctctgccccctccatctccttcaacacagaagcttcagctcaggaaaggaaaggccacctttcacatgcagaagcgcatcagcttctggaggggtacttcatgaaggtactgcctccatcttctcagtctccaaaccatcccttgctttggacctctccttttcaactgtggccctgcagccctctttgagaagagggatgcaagagccttagagttcccacttattgaagcataggaggagtgaaggctctcaggacctccattcaggactcctggagggggtagcaatgcttgcagagttcatagcgcccagatgcacctgaccttagctccatatcccaggatgctcatccctggatccaggatgatgtgcttttggtgccagaagtttctgagttccacttttcagatgggataacacagccaaagaaatcagacttcatcttaaagggagacaggtttctggtccctactcttcctgcactgtgctgacagctgcccttctggtaggagctgatataggtaagtttcacaataacaagaggaagagattactcatggcttttctggatgtaccaggcttgtttgagtaattttccagtgtttggcattaccagacattggatccacattctacctcgttgctagctacaagaacttgttcaagctacttaacttctgagtctcagattcctcatgggtttattatcactaaggattaaataatctatgcaaaatgtccaatgcaaagaaggtattcagtaaacatatctgaggaggtcagatcaactttttttcctagaattcaattctaaatggaactcactttgtggatacttacaagaaacactacatagtgtaagggaaatgtcttagtgcaatttcacaaaacacatggaattattatttgggaggctggacctttcacggaattgtagctgttttgattgtctcatattcaccttgttggtgaaggagggatctcccccattaaatagtaggagataactagacacatggcatgacacactggacagatgaaattggcggcagtttattagtcacaactgctcacagggagggaggtcaccacatgccatgcggggtcacaggagagttgcatttgggaatagagtgaaccagtaggggctgtggaaggcaggctttgcagtaacaagaggaagaggcgattcctggctcctccagatgtgacaggcttgtttgaataattttccaggctggagggaagtgagccacgttgagacccagggagggtacagctgactgcctggtaagggaacttagaagggggaagagccttcctgctcagtgggtgaatagggtgcacatatctgacaagagcaggggacttcatggccaggcctctgaggccctgagaagcccatagatgtcaaggcagcacatgagctttcaggctttacaagacagaaataaaatagtgaatgataactcttcaaagagaatatgacaaacaaaatttcacaagaccctctaggaacaatatgcatattgttatctctatgttttatgatttacatggctaaagtctgattatattatatttctataacagataaaaccattatcattcattttcataattcatattgaaatgatttgattatcctcattccaggaaagaaaaaaaaaaaacaccctcctgcttggatacttagaggttactccatttacactccccactcccacctcttactccacttgactggactatccacaaggcagtgcaaagaggtgtgtgtttccctgaagaagagggtgccaccctgttgctcctggctgtaacactcagaggctctctctgcagtggaagaatcatatgggctgattattccccacctttcagacttctttccaagtccaagtgttgggcagaggaggaagaggaatgagagtagcaaacccggcaacctctgatactccctctttcctctctcagcccacatataatgtggatgtctccttgtaatcttcagtctcattctctccctgaagctaagtagctggctttggtacaaagggaaaagttggccagttatggaaagaaaatatgggttgtgtcagtgaagttctgagggctcagggtctttctggctgcaagggggttgatggaatgtctttttagctgtgccctagaaaacaatataactctccctgttcaatctaaatcatcagtgtgttcccttatcactgatcacagcagttgcatttcaagcctgtaaaccatacagtatggcaataccagtgagggagacagctagaaatttttaaattcaaattttaacgctatttgtgaaaagaaaaactacctaatattaacaagcaaaaaaacctggaagagattatttcatctagagagacatcacagatacttgataagggaaaagctaaagctagagaaaaggtctacgagttggcaatatttccaaagaaaggttttaatgtttgcatagttgtttagagaaaaaaggactcctttttatatttgacagttttgtaaagaactgactataaaactgtttaaaatattatcgaaatagaataacaatatattttcacctttagttttatcagcaacccaggagtttacacgtgttgtggacttctctgtatcattcacaaagtctagctgttttatcgttgcttggtagaatttgccacaggaatctgtaaaaccctaggaaaaaccaaaaacataatttcacagctacagaaacaactaatatcactggcttacttcttcattgtgccacatcagaaaatcaataattttatgatttaccatatataatttgcaaataaagatgaggaattaacctaaagtccaaattcttttcagctattcctaatcttagcttataaactaagcaacgcggtgggctgcatatcaagtgattttcatcaactgctggatccttcatgagagtggcagtacacccatcaatgagataatttaaaacactgagaaatctccaagaagacatagaaatccttaataggtaagtacctaatagtggaccatcaagacacataaggcaacaactaatagaactgaaaggagaaatagatgaatccactattataactggagacttcaatatccctctatcaggaatgaacagatccagcaagcagaaaattagtaaagaacatagttgaactcaaaaacaacatcaagtaactagatataattgatatctattgactacttcatccaacaagagtagaatctatattcttctcaagcttacatgaaacatttaccaaaagagaccacattctgggccacaaagcacaacttagcatatttaaaataatagaaatcatgcaacgtctgctctcagacaataacgaattaaactagaaatcaataagagaaagatggctgaaaattccaaaagtactcggagattcaataacacacgaatcacagaagaaatctcaagtgatattaaaaacagtttgaactaaatgaaagtgaaaacacactgacaacactaaatgctggtgaaaacgtggagcaacaggaactctcattcattgctggtgggaatacaatattgtatagtcactttggaagacagtgtggaagttttttataaaactaaaaatatgatccagcaatcatgacccttaccatttacccaaaggagctgataaaacctgcacacaaatattcataacagctttattcctaaccggccaaggtagaaacaagaaagctgtcccccatgactgtactaggggatgttaatcacaggagggactatgcatgtaccttttgctcaatttttctgtgaacctaaaattgctttagaaaataaattctttttttttcttttttacaaatggtgactatagaagctgtcactcctgtaaattattaaatttgttgagtgaggattaacacagcaagtgctatatttgcctctacattttagaacaacagactataaatatgagtctgttgttccataaattacatgggaaacatatacaatcctagaccagcagtgtccatcggaactttctgggatgatgaaaatgttgtaaatctgcaatgtccagagcggtgccacataggctattgagcacttgaaatatattaatagctagttggactgaggaactgaataattaatttcatggaaaccttatactcatgtacataatgcatagcattatgggtgtttcaaactatgatcaactttccaaaaaagttcaaactatatttagttaatatattctgtagaattataatgatcttaacagaaacctacactatgccacataaaagcagaacatttggtggaaattaaatgagctgaaacaactaatttatgaaccatgcattatagaattgtttcccaatctttctctcaaactgctcacagctaaatatttaatttccctttccataattttgcttttactttggaattttatacttctgtatcagtatggcatggagaggaaatgtgactgtagttaggaacacaagttctgcaacttactagttgtgtgaccttcaaatatttgcttcctctgtttatgcctccatgttctctcctgtagaacaaggaagcagtaatagctacacctcacaagataactgtgaagtcctgatgaaatatcaccttttcatgtaacgtttttgaattctcagtaccacgtaactgatcgatgtacactatttcacttaatcctcccataattcatgcttttccaaaattgctgcctctgcctatttttcagtggtttggaaattatttaaatctctcagtgtaagaaaataatctgaaggcaaactgatgaatcacatattgatgacttcttgcacgcctaggtgatctttccatctgttaaacgtgtttttaaataactgtctgctattttaagttactatttgacaaagtgtggcaaatcaaacaaaaagaacatgtaattatatattgctattggtatgggattcttgaaaataagaataaataataaattaatctgaaatggtttacaaatatttctcatctttttaatttatattccaatatcaaaataacattttaaatatcaatgcttttctttcaaaatatccaccacgaattgatatttggttgttaacattttggttgtctttatatagaaaactagtaagctagtaaaaagatggcaataaactaaatagtgctaagactagtaaaataagtgaagttgtaaaatcacaatatcatatacaaatcttataaatatttcacttttatgtcttaccaccttcactttataccaatctgtttgcaaacaattaatttagagtcgaaagcaagtttgaaaaaatacatatcacagtaagagagatatcctctacaaaaataattcttataagtcaataagaaaaagacatacaaccccatagaaaaatgtgtaagaggatatgtaaataggcaattcacagaagagatagaaattctcaatacacataaaagtgtttaatcccatttataatcaaaagtttttattttttttttttgttgcttctcttgttttgtattaacccttccctatcgcatatgttgtaaatattccatctcagattcttttttaaaaactttattttaggttcacggatacctaagcaagtttgttatataggcaaatttcatgtttcaggggtttagtatacagattatttcatcaaccatgtaataagcctagtacccgataggtagttgttcaatcctcaccctccccacacccttctccctcaagtaagcccccatatctgttattcctttccttgtgaccatatgtactggatgtttacctccaacttataagtgagaacatgtggtatttggtttcctactcccgtattagtttgcttatgattaatagcctccagttccatctctgtggctgcaaaggacatgatctcattctgttttatggctgcatcgtatttcgtggtgtatatgtaccacatttttttaatccagtctactattgatgggcatttaggttgattccatgtttttgccattgtgaatagtgctgcaatgaacatatgtgtctttatggtagaatgatttctattccttcaggtatgtactcaataatgggattgctgggtcaaatggcaattctcttttaattttcttgagaaatcaccaaagtcctttccacagtggctgaactaatttacattcccaccagccgcatggaagtgttctcttttctgtgcagcttcaccagcatctgttttttgacattttaataacagccattctgaatggtgtgagatggtatctcatcatggttttgatttgaatttctctaatgattagtgatgttggcaatgttttcctaggcttgttggccacgcatatgtcatcttttgaaaagtgtctgtccatgtcctttggccactttttaatggagttgtgttgtttggtttttgcttgtaaatttaagtttgttttttttttaatagattctggatattagacctctatcagaggcatagtttgcaaatattttctccatttctataggttgtctgtttacactgttgatagtttcttttgccctgcagaacttttcagtttacttatgtcccatatctcaatttttgtttccgttgcaattgcttttggcatctttgtcataaaatatttgccaaatcctgtgtccagaatgttatttcctaggagggcgtagagcaatcttacttctcccaggaaccacaactgtggcctctactggggctgtggctttggtgctggtctgctacagggcccaaggcttgtagaggtccccctggactccagaattacccctggaaaacgtccaggtggcactctgccccagtctaaaagcacagtggggaaatgcggtggggacaggaggattctcccattcccaatcttgcataggtccctgtggacagtgtgaatcccactaggaactctcattcactcatccttccccattttgtaggggtcctcctgaccgcactgatcccagacaggctggtgcccagattcattcctgtctgctctgtgtgttcccctgctgcctagatggatctcgacatggtttctcagatgatcggctttcagggtcagtgttcactaccccttttgtttcctctcggtgacgccagcatcaggagctccttttagtcggccatcttggccccacccttccaaaagttttaaaggttaacattatgcagttctgctgatggtgggtggaactgaggatcctataaataccccctgcagaatgtaaatggctacaaaactgtggagagcaatttggcaatatttatgaaaacctcaaagcttcattcccttcctcccttctacaaatccattttagatagtaactcatacacatatgcacaaaactgtgtaaagaaatactcctgtctgtaatgggccagagtaaataagcttaaatactcgtcaatgcaagaaaggtctattataccatggtacagccatacttaggaataccagacaagggttaaaaagagtaatacagatccacatatactgagatggaaggaatttaggacatatttttaaggaaaagctaacaaagtataaaacaatatgcatagtacaataacattacataggagaaaaactcatgaagcaaagtttttatatgtgaaggaggaaacatcaaatctatgaaagctctaacgttaaaaaggggagttgtggcataagaaagaagctgatgacatctcttggtttatatgtgttgtttgtgtttttaaataacaagaaattacttcggtacttttcttttcaaaaactagaaaagtcatgaaagcattgtcagcgaatgcaaccagtgtaattagccaaaattagttttaaaagattttcattgctgaaacatctagtcaaactatttaatgcatacattatagtgtcatcatgcatagaaaattaaaaatatctgcaaagcaattacgagaaacagtcattttcaccacatctttgttttggctgattcattttcaactgtgttacgctctgtgtcagttcttttatgaagattatctcattaaagcttcacaaaattctgaacggtatttgctatatagcctgtgctacagatgatcaaactgaatcacaagatgcgtgtgagattcgtgcgtggagttctgagttcaggaccacctgcaggaattcatagcccatattcattctcctacttcccaccacattgctatctttattttcctaataaacaagtatgacttactgtgaggaaatcataagacttttctccaaagagcccgttggcagttctaagcacatattcagtgtcagttctgttaattgcaacaagaagtgactgaaaacctcgatgaatatctccatcttcacctccgattttactaaaacaaagtgcctgaaaataaaataataataaacatacacattctcagtattctgtgacttcaaaatataggcacaacagtaaactcagcaatatgagatttacagatgcttactacagcttaaaagatgatcaatctaataaaagatagagagtgtctcaaaagcaaccctgtctgcctacctatgcctcttctcaggcctccctataagcacatcctaaaagaaacgaatgttatctaagtattggtataagtggatatgccttttgcaaaccctaacaaaatgactcggatttcttgtgctatttatgatacttggtctaaaaacgcagctgccaaccatgtgtcctgtctctgcatacacatggtgctcctgacactaaaagatggagtctctctccccttcttcagaatctgggctggccatgtgacttgctctaaacagcagaatgcagaactggctctgttccaggcttagcccttaaaaagtctggcagcttccactttccctctcttgtaacccagctaccgtggtcgagaagcccaagctatcctgaggaaagaccacataaaaggaggaatggaaagacttgcttttagggaactgagggcccatccactagccagaaccaaggcccagacatgggagtggtatcttcttggaccttctagcccagttgcctgcagaagcacccacatgagtgaccccaggtcaccaagaaggtcaggccttgaaaacatgctccatcctgccaattctccatccacatcctgtgagactaccagagttgtctgttaaaggaggaatttcttcaagacttgaaatgcagaagtccagctcaactgataaattgatagcacttattgttgtcttgaagtggctttacgtacctgagacatctgagctgcagtgtttccctttgcccccatgaaaaccatggccaaggctgatgatatgctcatggggaaaaaaataagttgtttgagttgttttcccctagctttttcaaaaggtttaatgcaaatgtgccatttgcttctgatagagcatccatgacggtgagcctgaaacaatggatttttaaacaatattacattaatataggcttacatgtgtatttacttttcactctatttattactagttaaatggatacttgttttcattgaacaaataggtacacacacaaaaactacactagggcttttcttacaagatgtcatttaatccatacaagctgatgagataggtgctgtgagtgaatgtctgcactttacaagcaaagaaattgagccttcactgtttaagtctgttgtgcctgagatcactcaactacaaacagaaaagtaggcattagaaaccaggtctttgtggttccagggctcctcttaatcaccatggtataaggacttataacaaaagcagcagcagaaagcaagaaagttacttgcttaaaacatgaaatttgtaagaagaaaaactattgatttccaatactggtaaaataggtattccctcctatattccatatgtgattatgtaaattgggacaccaatattttcagaatgtaacttagaattatgtttttataaatggaggaaggaacacagggatggtggaagggtaggaaaaagaaaatgccatgaaaatatttatacctttaggatgaaaaattccatttcaaagaatttcactaaagataaagctcacaagtactgataaaaacagtatgcagaaagatgactactgaagcactttatatgctacagagaaaatatttaaatacccagcaacagagaaccagttagattctgtcaaatccatgattgaatataaatggagatattaaaaattacagtcatgccatgagaaaatacaatattaagtataaattaagaataaagttacatgtaagtataattcatagataaaaagactacagggaaacactgaacatcacatatttctggataatgagtaattctaattttatttatatcctttgctattttccctacaatgtgcctatatttgtttcagtgtcatttggtcattgtgcttttatgaaattaatggacttgcatgtagttgaaaagtgagataacactaggcgagatcttttttttttattattatactttaagttttagggtacatgtgcacattgtgcaggttagttatgtatacatgtgccatgctggtgcactgcacccactaactcgtcatctagcattaggtatatctcccaatgctatccctcccccctccccccaccccaccacagtccccagagtgtgatattccccttcctgtgtccatgtgatctcattgttcaattcccacctatgagtgagaatatgcggtgtttggttttttgttcttgcgatagtttactgagaatgatgatttccaatttcatccatgtccctacaaaggacatgaactcatcattttttatggctgcatagtattccatggtgttacacaaatcaaccagtgtcttcccactactcccaactccccagaaacaatcaaacctcagtgcaccctttctcttggtatttactttcatatttagaaataattgtgtatatgactatttttaaccccacaatttttgacattataaattgccttcctaatttagggctgatgattaattttcttttatcacttaccgtacttcacttcctctctccaagtgtttgccttattgcaactaaatagtattcgctgctaagccaattaatcaataatggatgcattgctttttttacacgtctgtttttccttatgtcactattgccttcccctcttttcttgttttcactttttaaaaatctatggcaaattcccctcccaccaaatattctacagatcactcaagctctttcagtaatttcttcgtatgctcaaccacatatgagtaatctatcactcccatttctcatctcccacagtttcccccctgctggtgagtgcaggtttatttagtctgtaagattttcattcccgaagcagaattttcataaacagagaccaattttttctattattataccttatttagtcaatgatcaattaatttcttgttaatttggtaaacaaattgttttccttaaactttaaagcacactgctaacacagcaaatacgttattttaaacatttaagcattgatgataaagcttaatgtatcagatgttttaaagatgtaatcactttaaagaacaaacttacaaaattaacaactatatcattaatataagcatttgtacaataataaactgaataaatcaacacttataaatctgttaaactagattctcctaagactttcaaacatgttttaaaatacaactgtacaacagtgattataaaacttatttctagcaccccactagtaatactgtgggttttatacactttatcttcactctatctttttatatttcctagggtgatggtaatgcttattttaatacttttctggggttaaattaataacagaccatctcctattcacaaaaacaataggatggggctgccagattgatggttgggacatgggctctgactgacctgacactgctacttttcaggtcatactgctttttaaagccaaacaaatgtaaggaccattttgcagtttggtcctacattgggattttgcaaagacaactattaaatttgcttttttcttttttttgccaaatgcctttccttgaaatgaaatactatttgaggttctcgtgcatctgatttgcgtaacacagagttctatccacaagttggctttcaaagtctcctggtttaatatttaggccttcaggttggtttttgtaaccactgtgcctgtcaacctaggtgcctatagtcactattcctacacagcagtcgtatatgaatcatcacacagcatttcttgtaaacattattgaaattatttcctgcctcctttaaactcatcttacatttttttttttttttttttttttttttgagagagagtctcgctttgtccctcaggctggagtgcagtggtgcaatcttggctcactgcaacctctgcctcccaggttcaagcgattcttctgcctcagcctcctgagtagctgggactacaggcccatgtcacgacacccggctaatttttgtatttttagtagagactgggtttcaccatattggccaggctgggtctcgaactcctgacctcgtgatccgcccccctcagcctcccaaagtgctgggattacaagcgtgagccaccgcgcctggcccattttacttgttttatctgaatttactaaaggactctttcttggctttgttgtaacatgtatttcaattaacacatactggtttttgttcttgagcaaattctcacaacttgtctactgggaatctctgtaaattggttactttctttttacactatcccaacacttttgctttctggcaacagtatcgtcctcattttgatttttttccagtccaaaaacatactatcaacgcctctcctggtttcttttaaaggaggaggaatgtcaagtacaaattctgaatactgagagcatacgagtttcggtaccgacaaataaatactgctgctgttgtttttcctggaggtcccaggcctcacagccccttccagcgcccaacataaacttcaccagggtgggaggcctcattgtacctacttccagctcctgcaggatgagtggagcccaggcaggactttcaccccccagctccgcgcccattcgccctggcctcccctccccgcgcctggacccatagggcacacagccaagtgcagccaagtccctgcccttagggagcccccgccagagaccgagtaaagaaggacagccccagggaaaggtctggagcaacaggtgcgctgagcacttcactgggcttccctttcgtaggttcccgcccttttcctgggctcaagagcaggtaacgagaatccagcgtgtgggaaccactcccaaagtcaaacacctaccccagttctccgcgcagctgcccaggagcgaagtgagaccgggtcggagaggcgggaatagagatgtctgagcggcgccgggtgttagttcccagtgaatggggaggcgggcggagtcgggcccagccaggcaccacctagcgggcgcctgggcaggagggcggggcgggtcccgcaggccgcggggatctcctgatgtgcaggaagtggccaatctctgtgcaggaaaaagccccaactgtccgggagttttcagtcaagaagcgataatgcgctttggctatttggggtttttcgtggttccatacaaattatagggtttttttttttttctatttctgtgaagaatgacattggtattttgacagggattgcattcaatctgtaaattgtttgggtagcattgtacttttaacattaattattccaacctatgagcatgaatatgtgtccattttctgtgtgtgttcttcacgtttttctcatcagtgttttatagttgtccttgtagaagtctttcacttttttaattaaattgattactaggtattttatacatcatatttcttatagctattgtaagtgggatttctttcttgatttctttttcagactgttcactgtagatgtatagacatcttacggatattttatatccattttgtattctgcaactttactgattcatttattagttctagtagtttttgaggggagtcttttggtttttccgattataagattataccattggtgagcaaagctaattttacatctttctttccagtttgggtgtcctttgtttctttttcttgcctaattgccccggccaggacttccagtcagatactgaataaagggggtgaaactgggcatccttgtcttgttgcagatcttataggaaaggttttcaatttttccctgttcagtatgatattagcagtgggtttttcattttggtttttattgttttgaggtatattccttctatacccaatgtgttaaggatttttatcataaagagatgtaggattttactgaatacattttcggcatctattgaaatgatcgtgcagtttttgttgttggttcttttaatgcaatgtatcgcatttattgatttgtgtatattgaatcatacttgcatacccgggtgaatctcacttgatcgtggtgagtgatctgtttaatgtgttgttgaattggagttgctagcaattttttgaggattttttctgttttttacctgttgatatgacggattcctttgattttcaaatgttgaattagtcttgtacacctgcaatcaatcttacttagtcacaatgtataatccaactattttacacatagtttgatttcatttgtgaatatgttgttcaggattttgcatctatactaatgaaagatattggtctttaagtttcttttcttctaatgtctttgtctggttttgttatcagagtaattccagccctatagaatgaattagaaagtagttcttctgcttctatcttctgaaagagatttagagaattggagtaaacgttttcttaatttgtttttagaatttaccagtgagcccatctgggtctggtaattattttagatggctattaattattgattaatttttttagtagatataggcctattcaaatgttctatttcctgttgtgtgacttttggcggattgtgtctttcaagaaattgatccacgtcatgtagtttatcaaatttgtgggcacagagctgtcctgagtattcctttatgattttttactgtacatgggatttttagcatttcaccactttcatttctgatattagtaatttaggcttttctttttgcttagcctgggtacagtctcatcaattcattggtcttttaaaagaactagcttttgttttcattgattttctctctggatttcattcatttctgcccccatttttattatttattttgttttgcttagttgggtttaatttactcttctttttctgatattctaaagtagaagctgtggtgattgattttagagtttttaaaacaaagtttctacttttttaacgtatccattcaatgccatgaatttttctggagaggtgactcacattgtccagtaagccaagaaatgttaagtgtctaaatagtaaactctaaccttgggtgagtaaaatatgtaaactagtggattaaatcatctgtgattgaatccattacttaactcactacattagttaagcaaatatttaccttcactccttcatctttaacctcttcacttttttgaagtcttatctcataattatactcaatatcttatatatttttaaaaacacactttctttacttttgtatatgattttacttacataaatttcaagaaaatgcaaactgatctatagtgacatacggtagatcaatagttgcatggaacatggaactgaggagagggcagagagaggtgggtgagaggcagtataaaggagaaggggatactttggtgtgatggatatgttcactatctagtttgtttttacaggtgtgtacgtgtatatatacatatatccaaatgtatcagattatatattttatttttcattaattaattttttattactgttaattattatactttaagttctgtggtacatgtgcagaacgtgcaggtttgttacgtaggtatacacatgccatggtggtttactgtacccatcaatctgccatctacattaggtatttctcctaatgctaccctcccctagaccccacccccatgacaggccccagtgtgtgatgttcccctccctgtgtccatgtgttctcattgttcaactcccacttatgagtgagaacatgcggtgtttggttttctgttcttgtgttagtttcccgagaaagatggtttccagcttcatccatgtccctgcaaaggacatgaactgcatagtattccatggtgtatatgtgccacattttctttatccagtctatcattgatgggcatttgagttggttccaagtctttgctattgtgaacagtgccacaataatcatacgtgtgcttgtgtctttatagtagaatgatttataatcctttgggtatatacccagtaatgggattgctggatcatatggtatttctggttccagatccttgagaaattaccacaccgtcttccacaatggttgaactaatttacactcccaccaacagtgtaaaagtattcctatttctccacatcctctctagcacctgttgtttcctgactttttaatgatcgtcattccaactggcgtgagatggtatctcattgtggttttgatttgcatttctctaatgaccagcgatgatgagcttttttcatatgtttgtcggccgcataaatgtcttcttttaagaagtgtctgttcatatccttcgcccactttttttatggtgttgtttgtttttttcttgtaaatttgtttaagttcttcttacagtctggatattagccctttgtcagatggatagattgccaaaatttttctcccattctgtaggttgcctgttcattctgatgatagtttcttttgctgtgctgaagctggatcccatttgtcaattttggcttttgttgccattgcttttggtgttttattcatgacgtctttgcccatgcctatgtcctgaatggtattgcctaggttttcttctaggattttcatggttttaggtcttacatttaatactttattacatcttgagttaatttttgtataagatgtaaggaaggggtccagttgcggttttctgcatatggctagccagttttcccaacaccatttattaaatagggaatccttcccccattgcttgtttttgtcgggtttgtcaaaaatcagatggttatagatgtgtggtgttatttctgaggcttctgttctgttccattggtctatatacctgttttggcaccagtaccatgctgttttggttactgtagtcttgtagtatagtttgagtcaggtagcgtaatgcctccagctttgttctttttgcttaggattctcttggctatgtggggtcttttttggttccatatgaaatttaaagtagttttttttttctaattatgtgaagaaagtcgctggtagcttgataggggtagcattgaatctataaattactctgggcagaatggccactttcaccatattgattcttcctatccataagcatggaatgtttttccatttgtttgtgtcctctcttatttccttgagcagtggtttgtagttctccttgaagaggtccttcacattccttgtaagttgtattcctaggtattttattctctttatagcaattgtgaatgggagttcactcatgatttggctccctgtttgtctattattggtgtataggaatgcttgtgatttttgcacattgattttgtatcctgagactttgctgaagttgcttatcagcttaaggagatttggggctgagacaatggggttttctaaatatacaatcatgtcatctgcaaacagggacaatttgacttcctctcatcctatttgaatatgctttatttctttctcttgcctgattgccctggccagaacttccaataatatgttgaataggagtggtgagagagggcgtctttatcttgtgccggttttcaaagggaatgcatccagcttttgcccattcagtatgatattggctgtgggtttgtcataaatagctcttattattttgagatacattccatcaatacctagtttattgggagtcttcattttttataccttggaaataaaactctgccttttcatttttccattctccatcaagcttctttataaaaagtgtatacacagagtgttgtctttttttcacgtttgattctctcctgaccccactgcagttagaagtccaccccaacattctctgaaattcctcctgataaggtcaccactccttttttaactgccatggccaaaagatatgccccaggtcttatctcattttgtttgttggcgacttttagccctttcgtcttcggccttccaaggatgtccagagcccccttcctttcttgctcaactcctttgcttggtatccagattcctttcctccgattctaggccctctacttttcattataatatgatcttgtcatgatcttatcatatgaccttaactgtatccataggttcaagtttcaaattttacttatttcatccatatcgctaacctggctcttgagctgtagacgttacctgtgtacaactggacatctctcagaaacctgggtgcatcccttcccagttctcttcactaaatgatcaacagctctgccatttctatcaccttcatgctgcttcaatccgctctttctcaccttcatcacatctcatttctctcctaaacaattaatttccttacagttctcctgatcaatgccaacttattctctcctctgaagtccatataaacattcctggactttttttggttggtaggctgttaattatagcctcaatttcagagcctgttattggtctattcagggattcgtcttcttcctggtttagtcttgggagggtgtatgtgtccaggaatgtatccatttcttctagattttctagtttatttgcgtagaggtgtttataatattctcttatggtggtttgtatttctgtgggatcagcggtgatatcccctctatcattttttattgcatctatttgattcttctctcttttcttctttatttgtcttgctagtggactatcagttttgttgatcttttcaaaaaaccagctcctggattcatttattttttgaagggttttttgtgtctctatttccttcagttctgctctgatcttagttatttcttgccttctgctagcttttgaatgtgtttgctcttgcttctctagttcttttaattgtgattttagggtgtcaattttagatctttcctgctttctcttgtgggcatttagtgctataaatttccctctacacactgctttaaatgtgtgccagagattctggtatgttgtgtctttgctctcattggtttgaaagaacctatttatttctgctttcatttcattatgcacccagatgtcattcaggagcaggttgttctgtttccatgtagttgagcagttttgagtgagtttcttaatcctgagttctagtttgattgcactgtggtctgagagacagtttgttataatttccgttcttttacatttgctgaggagtgctttatttccaactatgtggtcaattttggaataattgtgatgtggtgctgagaagaatgtatattctgttgatttggggtggagagttctgtagatgtgtattaggtctgcttggtgcagagctgagttcaattcctggatatccttgttaactttctgtctcgttgatctgtctaatattgacagtggggtgttaaatctctcattattattgtgtgggagtctaagtctctttgtaggtctctaaggacttgctttatgaatctggttgctcctgtattgggtgcatatatatttaggataggtagctcctcttgttgaattgatccctttaccattatgtaatggccttctttgtctcttctgatctttgttggtataaagtctcttttatcagagactaggattgcaaccccttctttttttgttgttttgcatttgcttggtagatcttcctccatccctttattttgagcctatgtgtgtctctgcacatgagatggctcttctgaatatagcacactgatgggtcttcactctttatacaatttgctagtctgtgtcttttaattggagcatttagcccatttacatttaaggttaatactgttatgtgttaatttgatcctgtcattataatattagctggttattttgctcgttagttgatgcagttccttcctagcatcgatggtctttacaatttggcatgtttttgcagtggctggtactggttgttcctttccatgtttagtgcttccttcaggagctcttgtaaggcaggcctggtggtgacaaaatcgctcagcatttgcttgtctgtaaaggattttatttctcctgcacttatgaagcttagtttggctggatatgaaattctgggttgaaaattattttctttaagaatgttgactattggcccctactctcttctggcttgtagagtttctgccaagagatccactgttagtctgatgggcttccctttgtgggtaacccaacctttctctctggctgcccttaacatgttttccttcatttctactttggtgaatctgacaattatgtgtcttggagttgctcttctcgaggagtatatttgtggcattctctgtatttcctgaatttgattgttggcctgccttactaggttggggaagttctcctggataatatcctgcagagtgttttccaacttggttccattttccctgtcactttcaggtacaccaatcagatgtagatttggtcttttcacatagtcctatatttcttggaggctttgtttgttttttcttactgtttttttctctaaacttctcttttcgcttcatttcattcattcgatcttcaatcacttataccctttcttccagttgatcaaatcagcatgtctcatgtgcatgtgtcatgtagttctcgtgccatgattttcagctccattaggtcatttaaggttttctctacgctgtttattctagttagccattcgtctaatcttttttcaaggtttttagcttctttgcgatgggtttgaacatcctcctttagctcggagaagtttgttattaccgatcatctgaagccttcttctctcaacttatcaaagtcattctccgtccagctttgttcccttgctggcgaggagctgcattcctttggaggaggagaggcactctaatttttagaattttcagcttttctgctctggtttctccctatctttgtggttttagctacctttggtctttgatgatggtgacgtgcaggtggggttttggtatagatgtcctttctctttgttagttttccttctaacagtgaagaccctcagctgcaggtctgttggagtttgctggaggtccactccagaccctgtttgcctgggtaccaccagcagaggctgccaaacagcaaatattgcagaatggcaaatgctgctgcctgatcttgcctctgaaagctttatctcagacgggcaccaggccgtatgaggtgtcagttggcctctactgggaggtgcctcccagttaggctatttgggggtcaggaatccacttgaggaggcagtctgtccgttctcagatctcaaactccgtgttgggagaaccactactctcttcaaagctgtcagacagggatgtttaagtctgcagaagtttctgctgcctttggtcatctatgccctgcccctagaggtggagtctacagagacagtcagggctccttgagctgtggtgggctcttcccagtttgagcctcctggtggctttgtttacctactcaagcctcagcaatggcgggcacccctcccccagcctcgctaccaccttgcagttcgatttcagactgctgtgctagcagcgagcgagcctccgtgggcgtgggaccctcccagccagtcgcgggatataatctcctagtgtgccatttgctaagaccattggaaaagtgcagtattaggatgggagtgacccgattttccaggtgccgtctgtcacggcttcccttcgctaggaaagggaattccctgaccaattgcgcttcccgggtgaggtgatgccccaccctgcttcagcttacactcagtgggctgcaccaactgtcctgcacccactgtccaacaagcctcagtgagataaacccggaacctcagttgaaaatgcagaaatcacccatcttctgcgttgctcacactaggagctgtagactggagctgttcctattggaccatcttggaacctgatctctcctaagttttgtatttttagtagagacaggatttcaccatgttggccaggatagtcccagtctcttgaccttatgatccaccggcctccgcctcccaaagtgctaggattacaggcgtgagccaccacgcccggccatatcttcaaatatcttagtggagggtcaagcactgaggctggaacatatttttccggcactcagcaacccgcgcctcagcttacagactggtaacaaccaagtggtgaagaagattccttatctctagtggcttccattccctgaactgaaataatagatctggaattgaagaaaattcacagtccatcaatataaatgcaaattgcttttttctcccccttactggaatttcatggaaaaattctgaataaatttacctctcttgttcccacagttaagaatcaaaataattcatttttgagggaaaaggactcagcgatgcaatgaggccatgctctcctgctccactctagatttctattgtactgttttaaaaagagaaaaagtgattgtattttttaaaccacagaccatcttttacatttagatgcttagatattttctaaatccttcccacatcaaatcttttcatcccttgaaatcccttcttcactaaataacagatttgggaaacaatataaacaaaccatttactagttgtccataacttcatttattagacttttattgtactgagcactgcaacaggccataaggaagttaagaaacaaaactaaataaaatatgtaccttctttttctctgtatctcagatgaatgggaaagacaggttgtatttacaatagagtggacagcggctttaatggagcaggtacacagcagtatgagaagagaatgatggaaacagtagctctggggactcgggatgaatccacagtagcatcagttgagctgagtcttataggatgagtgactttacagatggagagtggagaaagaatatgttaggcagaggggacatatttctaaaatgtggttgtgaaaaggtttgtagcaggtgaagaatgggtatattttgagggtggaatagaaggtgtatactggggagtggcacatggtgacattgaatgaggttaaacccagtcagtaggtcaagcctaaactgggaaagattctgtctgccattctaagaaatttggggcttattctttgagcaatggaaaaccattatagaattaaaaccagagaagtggcatgatagcatgatttattgatttctctctctctctctctctctctctctctgtctgatttactttaatgtcaatacttaggatgcaggaggagaccagaacacaagtattttgggcctaagcccagacagtagcaatgctgatgccaagaactcattagaaggcagaaatcacaggagctaatgaccaagttgattttgggggagagggcaaggaaaagagcagattactatatgacttagttttttaacatacataattggataaatgatgaccttattaacagagagagagaacatgggggaaaggagtagcaagtaaaaatgcctggagacagaagtaaagactaaggtatggtgtagaggcaccaagtgaagtttcaggagacacaaattggcccaggcagcttgcatataaataagacattggtctgatgaaagaagcctagatgatgatgccaatatttatttatttagagataaggtctttactctgtcttccaggctggagtgcagtggcacaatcatggctcactgcagctttggcctcctaggcctaagtgatcctccctcagcctcccaagtagctgggatcacagacatgcaccaccatgcccggctaatttttttttctcttttgtagaaacagggtctcactatgttgcccaggctgatctcgaactcctgagctcaagtgaccctctcacctttgcctcccaaagcgctgtgattacagaaatgagccaccatgcccagcaatgccaacatttaagatatggcttcagaaagaggacatagcaaaaaggatgtaaaaaaggagaagatacagaaaaagctggacaaagaaaaagaaggaggtgaatagtatcagcagctgctactagaggaaaaggaacattaagattgaagagagcccacttctcagtattctagtcactacttaccttagtgagagtggttgggataaaaatcaaattgaattggattgagatataaaagggaaaagtgaagacagccctcttcgactactctttcaagaaacctagccatgaggaactagagagagcatgctgtctacagatagagggaagctggaacaaggatagtatggtaaggacagatggcatttaccatgtcttttgccttctgaatagtgacaatcagaaacagcaggtaaaatactaggaaattagggaaatgtctttgatttaatgaaaaacctaaactaaaaaatgtatggaagagctgtttaaaaaggaggatggacaggacctggggattgttgggtaggagggtgaggaaggagaaagctggcatgatttgcagacttactgacttggacaagccagtgaatggcagtgacaataagcaagattggggaaagaggaaactgaatgaatttggaagagaaaatgaatttcgtttttgacatgctaaggttatatggaaagttcaggggaagtttgggaggcaaaggtgggaaggtcacttgagctcaggagttcgagaccagcctgggcaacataatgagaccctttctctacaaaaaaagaaaaacttagtggtcctcaacaaatcgatatagttgaagtcacgggaatggagtgattttccagagggtgtgtgaagagcaccagagccctaagaacgccaaaatataagcggtcaatagaggaaaaaagagccggaaaaagacacttggagaggcaagagaggcacagaaagaactagataagagagttactgaaaacaacaaataaaaggaggaggacttttgaggaggaagttgagcagtttggggagatgaccaggttcatatgggatcacagagtgcgtggccatagttaagtggcagtaaaagtgcctagattcgagcgggtgtagaatcttgtgggttgggggttagccgggcatctaggaggaactgaaagctgcagatgtgtggacagatgatggtgcaggtaccgatgaccaggaagctgagccagatgctgaaatccggagatgtcgggaaaagagcagaggctcccgtgtggtctaggagctgagtcagacggagaaatacagggctcggagtccctgaaagcaacaggtaacttcaggccctaaaattggggtagccccggcctcgaggtgatccctgcccgagcctagcgccggttctgggccagggcgcgtggggtgtaggagcgatgggcgatgctacccgtagctccgtggagagatggggccggtgaggcatccctagggccaccccccccaactccggggggagttccttcctccgggctctgagcaccagctgatggcgccctcctgagcccctgcctccccacaccgtgttcttcccttccgcgctggccttgcgggaactcgcccgcccctgctagggctccgccccacgggcgggcgtgggtttcactcggaagctctttcaaggattctgcgccgcttgcattctgcggggctggactgtgtccgcggaagctcccccatcccctcagccaaccccgtgctcccctcgagggctcctgggaggactgggctggcagcgggggtgggggtcgcaggatgccacgggtaggaggtcatggggggaggatcaccttgatgtccacttcggggagagaagggtcaagggacacctcatacaccctaaggagaccatctattagttcccgccatagcgccccgtttatttccgtcacctcaccgatcaccagctgtaattagaattaggtgttgttgaggctgtggttcgctctccacgtccactagaattagtcaccaggaggtggcagccgaggcacaccgcgttcccccgccctggaccagtgttagaggcgacgcgctcaggccttctgtgcggacccggaaggaaggtcaggtcccggggcccgaaaggaagaggcagcagccgaggatgggcgcccaggaggaggaacgcgcgctgcattgcgctcgccggggctaaggctactgggggatgttggtattgagtatttcagccatccataatgactatttttaataaaacttttattttggaataattttagattggcagaagaggtgcagagataatacagctaattctcatatactccagtacagtttccccaagtgataacatcttacatgaccacggtacatttgtcaaaactagggcaccaacattgagagattgctactagctaaacttcaaatttcatttggatttcactagttttttaagctaatgtcaatataagtattttttaaatagcagaaaaagggggtttagttttacaatcataatttatgagccaccaaaatgatttttttgagacagggtcttgctctgttgcccaggttggagtgcactggtgtgatcttggctcactgcagtctcaacctcctgggctcaagcaatcctcctacctcagcctcctgagtagctgggaacacaggtgtgcaccaccatgccgggctaaatttttgatcaaaacgatattcttgagaaacttcgtatttatcaatatcatatcacctttataaagattttttttcatttaatgatgtatatgaaatatatgataacaagtatcatggatattgcaagtgatcaagaattgtaaggcattcagttgaatagcatagtacttctgaaatgtaaatgaaagtcacattagacaaaatgttaacgtgttaaaaataaaaatcgtcattctctccagctgtacagatatgacaggatcattagaatgcattatttcaagatctatttacttatattcaaatgtgaaaaaggtttagactacaaactcatttttgtgaaaattgtgcttttccatctcatggtacatttttcacactgtaagatggtcttgtttgttgagagatatgcaggatttagggggagcataatcttccataaaaaagaatggtgttggttttattgtgcctgatgaagaagaggaatgggtgatttgcattgaattcaatggatgggactctaattcgtatatctatctcactcccactgccagctgcagcttcagtaccttgttcatttatttccacaaaagccttatggaaaacattggacaaaaataggtttcttgctgaagacattcctgagaaatcagctttgctttggctgaaggcatcactcatccccatactgctcagggttgacttgagatcataactgtcttccagcttgaacttgggaaggtgtagctgcacttcatacaactccatcatgtctgcactggtccactcattcagcttctcataggtgatggccttttccagctgcccatttggaaccaagaaagaaagaatcagtaattccaaagtggaatgaaaaacagtagtagagagagcaccctaggaattacataggtgaattatgatcactcccgttactcagggtgacaacacacacacatctggaaatcctttggttgtataatgttgaccttcaaaatcttttttctgcagattaattgctatccggatataggagaattagagtttaattcaaaatggaagtacttctgctatagtatgcaagacatcagctatacactcaaatacataaatataaatatacatttagatgttagctatacaaaagcatatactctagttcaagttgtaagccaaggcacaaaaaatcttgtttatcgacatgggagacagctctttgaaaacaaaatttggaataaaataacacgtctatactctaatcaaaacaacgtgagattaataattatagactaagtcaaaaaagaaagaaaagataagaaaatcctccaaatctcaaaagtaattattttacagtgagtttaaggatgctttccctcttctttatattttaaatttttaaaatgataaatatgtgtgtacatactatatatgtatgtatatatgtatacacaaaaatacacatgtatatatgtgtatgtttgattttttaaatgacatgtttgtttcaatgcacatgcatcttctagacggaagttttggctgtcaatggcatacctgtaaaccacttacattaataacatgacagtatcttcagctcaggaaattgcacttctaggtttttatcttacaagggcttgactctgatggttatttgtccacactggttttattttcactatcctctccagtttcacaaattttatgacataatttggaaatattttctacatactagtaggatcgtggaaacttataagtattaagagtctgacacatgtgaaaaattagacactgtgcaaagaaagacaggccatccgttgcatgagactcatgttcagtttaggcatgcaaattgctcagaagcatggtttgacaaaagttgtgtccagattaatagaaatttagctggtaaacagcttaaataattcttgaagacagtattgatagagactttttctcctgaaggttgcttacttgataaaaatgttcaacaaataagttttggaagacagcttgatgtctgcgtacgtgtgtgtatactaatgcaaatggttaaaatattaatttcaaattacataggtcctaccagagggaaacctagactgattgaaagatggttatgatcaatccacacagttctgtgactgacaaggtatatttgtatctgttgtacatgtggctatgtgtgtgatgaccccaggctggagctgtctatacattgcctaacctttctgaggaacagtaatattaattttatagagtgttgtaaagtttaaataatattgtgaaggtgaagtgcctagaactcaaggtacattggtgacctttctctataggaattaaataatagggagaacattcttcctgaggacaattgggagaaaccttggccaagcagttcttttcttagtaaacactggaaacaccctcacatcagacacactgatgttatttacctgttccagcccattaatgtcttctggcagtagtataagcaggctgaggtcacggcttttgtagtagagttgaaggcccactgcttttggcttttctatgtgaaaaatgtgaagctttttcttcataaacatcatttgcactggtttgcttgtagtctaaaaaaaacaaaaaaacaaaaaaacaggtaacaaggtcattgaagaagtattccaccaactccttaattctctaccatcattggctctcagttggtgaaactgctgattctctgctaaatgctgaataaagttatccagaccttcctttatggaaatatctgttccactgaaaagtatcagcaatagcagatatgtgagtttctgtttctaacacaactgtggtaacctctataaatcacagcaacatgtattaaatcaaactcttaatatatgatcttgtgtaaattatggaaatgccaataatccaaaaactaaggcatattttacatgaaaatatttgagaaagtattttagtattataaaaattgacattcactaagagaatgcaaagacaagcaatagatgagcagaaaatatttgcaaaacatatgagacaataataaaaactcaacaaataataaaaaactcaacaataataaaacaaacaagccagtttttttaaatgggcaaaagatctaagaaacacctcacaaagaagacatacagcacatgaaaaatgctcaatcatatgtcactaggagattgcaaattacacacggctactagaatggctaaaatatgaaacaccaaatgctgatgacgatatgaagcaacaggcactgtcatttactgctggtgggaacgcacagtggcacagccactttggaaaacagttgggcagtttcttactaagttaacctagtcttaccatacgatgcagcaattttgttcctaggtatttactcaaatgtgttaaaaacagtgtccacagaaaaacttgcacacagtgtagtatttatagaaaatttatttattattgccaaaaaattggaaggaactaagatgtgcttcaataggtgaatggataacaaactgtggtacaattgtaccctaaaatattattcagcaataaaacaaaaagatctatgaagccctgaaaagacatggaggaacattaaattcatagtgaatggagccagcctcaaaaggctacgtgctgtatgattacaactatgtgacattccagaaaagccaaaactgtacaaacaaaaaaagatcagtggctgtcaggaatttagggggaatggatgaacaggtgaagcacagggcacttttagggcagtgaaactattcggaatgccattgtaatggtggctacgtgatattgaacattttcaaaatccatagaacagtacgacatcaagagtggacccaaatgtaaactatagattttagttaataatgatgtatcaatattagatcatcaattataacaaatatgccacactaatgtaagatgttaataataagggaaactgtgtgtgtgttgaaggggggacatatgagagccctatacttcgtgcacaattttttctgtaaacctaaaaatgctctaaaaatcaagcttattttaaaataagaccaattgccaaatgaaagcaaaacaaacacccctgcaacttagatgttgtagacatatgttacttttccattctatgtcgaactgtccatcacaaagccccaccgtatgctaaggtggtggccatacgacaagggctgtttactgcgagtactctagcatactgtggttgtttccagagagagcccatgaatggccccaaccagagccctcctagaactaatggcaaacactttctctgtctactagagttgtgaagcttgaagactgaatatgaggcaaccatattccctgatcattattagagaatgagagtagcaactagagagaaaaagagaaagagacagcatgagaatgaactgggattatgtgttgagactctaaataccccaatcactcactcctggacttcccagttttttgtcacctcagctaattccaatacaattcccattttgccagagctagtttggaatacttttctatcacttgcaactgaaaatttccagtgaatatataaacccaggtaactatccagctcacttctcgttaacctactcgattatgtgttcagtttcttccccatcctcaccccactgattgagaaatacctattgcacacattcattacagccatagttccacagcagcactgtttgtggcctatccctagactaaacaactgtaacaaaccttggtcaactagttcctttcctaggaatttggaatgggattttccaactggtctctagaatggcgaaggtcctgtgagtagctatgttctgtcattgtgaactgggaagcagagaaagttagaccacaacctgagagaagaatgatggtagaaacagagttgaaaaaatagaggaaaaaatcctgacaacatttaagtccttgtttccaatcaggtcccaaggcccagccacactccagcccattcacgagagtcaaatctataaccttactttagtctccgtttttattgcttttacttatgtaagggtaagaatttggtagaagttagtactggtttagcagggcaggtacagaacttgcagtgaggactcttaggttcttgttctggactgcttctaactcaggcatgcctccagtcacttggccacactatatttctcacctaggaaataaatatgaaaactaccctacccagctcacatgggtggcaaggactgagtgattgtatattcagagaaaaacaaggacaggggaatttcaatgaattccccatggaactgaaggcttttagcccagccatcacttccctggtaagagccatagttcactagaacatacaatctaaaagaagagtgaatttataagagaatcacttgtacaatgccatgtgaaaatccaaactgatctttaaaaatttcctacctcgtttattctaaaaggcttttctgtggtgttttgcactaagaattgatgttcccagattcctttaaagtatagggcgttcaccagaatcatcctggttgtggaatccacagagtcatcaggcaggagattctggattttacctgtaagaacaaaaggcaggttgcaaatgacttgtagaaatatgtatattttaactaaagacaaccaggcttctattttttctggaactataaaagttttctttaaaagtcctggtttttgattttctggaaatggacaagtactattcctgtccagaatagctgctgtgaataaatagagaaaccctgaagaaataatatgctggactgtcagtaagcattattccacataaagtacaaatttgcattttaattataaaaacttcccctgtaatataagttgatttgtaaccctatttctttttttttttctttttttttttttttttttttgcactttagctaaagattttttatttccagaaaattacaactacttgactaacaactctttgcacctactgatttaggttggacaacttgtgaaacatagtggtaaaaaaggaagttacttctctacttcaaggtttccaagtttgtggtagaaatctaaagaacatttctcttagcactacctctgggcaagacacttgtgctaaaatgtccttctttttctctgtacctttatgtcattgttaatatactctattcatcatttcccctcctctactcttagagtataaatcaagatctgtaaaattgctcaataacaggacttaactgccctggaggaagaagggatttttctttcctttttgaaattcagagggggaaatggtggcatttaaactcctgccaaaaattttaaatttctaacaaaaaaataaaataaatactcttgaaaattaattcatatgaacctttattttccttcaaaatttactggctaaaatgatggaaaaaatatatacatatatggagattaagagaaggtggaaagctgtaattagatagggtttgagttttggcatttcgtatttgtagctgttggaaagactttctgtaggactctctggtatttggtatccaagagatactatggttcatatgttcatccataatcatactaaaaagagccaagtattgtcacaaaagcaggtttagctgggtttctcaccaaattgatttacatgtgaacatggaaagttcacataggccaccgaaattgaaatctccttaagctgataagcaacttcagcaaagtctcaggatacaaaatcaatgtacaaaaatcacaagcattcttatacaccaacaacagacagagagccaaatcatgagtgaactcccattcacaattgcttcaaagagaataaaatacctaggaatccaacttacaagggatgtcaaggacctcttcaaggagaactacaaaccactgctcaaggaaataaaagaggatacaaacaaatggaagaacattccatgttcatgggtaggaagaatcaatatcgtgaaaacggccatactgcccaaggtcatttacagattcaatgtacccctatttcgaggggactgaaatacttccttctttttcacttctgtttgtagccacaaaccgtgagctgctctgattaacatctgaaaggctgtgccaatgttttcctgttgcccaaaatattgctgtgtgcaattgcttctatcagattgttatagttacaacttaaactgatatttggctatcaaccccgaatacattctctccaaactctctaataaagcaccttgaacgatttataaaaatacgtcaaatatatatctctcgaatcaggtattataggtttgctctagaggcacatgtttgataactgaggtagataaaactggattgagaagaacctcttggccaacccagcttcactctgcaacagacactactcagaataaagggctgatcttttaaactgccaaaatacagacatgggaaagctgttaaaattataagagacagcttgtggcacttaatttaaaaaataattttccaggaaaatattaatagaatctcaagaaatagtagaaaatctgaaaaaaaaaattaaacatgattgaaattgtacaactctcaagtgattacctcccgtggaaacagcatcaaccccagacatgtagacaggtaaattcttttcaaccttcaagtaaatgataaatctctacactattcacacagtttcaaagcacaaaatagaaaattctctgattacttttatcaagctggcatatacctagtataaaaatgacaagaaagcacaaaattcccatccgtaaacccatttctcttgtgaatataaacaaataaaccctaaattacattttagtaaataaatctaattaatatacattaggaatgcaagaaacatatattaggaaatctattaatgtagcgtgttgctgatatggcctgaatatttgtgttcctccaaaattcatatgttggaacctaatgttcagtgtgatagaattaacaggtggggcctttgggaaaggattagatcaggagggctctgccctcatgaataggattagtgtccttataaagggattgagggagcctgtttgccccctccactatgcgatgacaatgagaaggtgtcactttggaattatagagcaagccctagccacacgctgaatctcctggcaccttgattgcggacttcccagcttccagaactgtgagcaataagtttctattatttataaattacccagtctaagatgttttgttatagcagctgtaatggactgagacaattgctttgatgactgataggagaaaaaaatcataacatcatctgcaaaaatacttttgatcttcaaccttcatttctaattttaaaatgatgactttgtaaattaaaatgaagaatacttctataatattaaaaataatatttttcttcaacaaacccataataatgctaacccagaaacattagtggtatttatggcctgctatgactaccgttatttaacatttttctcaaaatactaagtaaagcaaaaaaaattagatgagatattatataaaaggaagagacaaaattattatttgcaaataataaggaaagcaaggagaatcaactaaaaaacaatgaaaactaataagaagttcttttaggtgctgttacactattacgctaaaaattatcttcttatcttctaacaataaacaattagaaaatgatataattacatcctagtgatacaccacatttataataattatgcttataaaatatcgttaaatgataacatcttatatacaccactgatccaaaccaggaagttaacattaatagaatattattgacaggtcatatttaaatttcatcagttgttttaataaagtcctttttttctgggttagaaatcaatacaagaccttgcattgcatttagttgtaatttcttcttattcacctttaatctggaacagtttctcactcattcattgtctttcatgaccttgacacctttaagaaagacttcccatttgttttgtagaattctcctgaattcccagtttaggtttgtctgatgtttaatcaagataatattcaagttatgcatttttgtgagagtatcaccgtggtgggttgaattgtgtcccccaaaaacacgtgtcccacttctaacccgtagtacctgtgaatgtgaccttatttagaaatacagtctctgcagatgaaataaagttaagatgatgtcatattggattaagatgagacccaatccaatgactagtctctctgtaaggaggggggaatttggacataggcacacagagaggagagtgccatgagaagatgcagagacaaaagagagatacagataacaagaggaagccatgtaccaatgcaggcaaagattggagtgatgtatcaaccagcaaatgagtgccaaggattgtcaacaaccaccagaagctatgagaagctcatgcaagtttcttctctagagccttcagagagagcacagccttgctgacagcctgattttgacacctagcccccaaaactgtgagagaatacatttttgttgtttttaaccactctgtttaccttaatgtgttatgacagccctaggaaactaatacaaccaccaaagtcatgctgtgttcttctcaatgaatcatgtaaggaagtgcatgatgcccatatgtcctattactggtgctattaatttgaacactgatttttccaatgtaaaaggactggctggtttttttattttttggtatcatgtgggaagatactttgagagcgtgtaatatactgtttcccatcaggcttttgtccactaattttagtatccatttataattcctatctaaaacaattactactgtggttactattgcagatggtggttttctatttccatcattcttctgtattcattaactagaattctactgtgagaaagagccttcccttcttcatttatttggatcttcaattatttgtttatatcagtatagactcatgggtatttgctttattctatgggttataatccattactatcattatttattttgttgcacaaattgctccagattttgccattggaagcctcccctgttggctcctgtgtccttctgacatattcccaagtattttgagcatttccttacattctgtcaccacaaaaagtccttatcttgtacttcgcttgtcccagctctgttaccaccattttgtccaggagctctgctttctttttttgaaagaaggagtttagaaatcaagatcttggtgtcagatatgctgattactattgggatgtcattgcttccagatcctctcagcaaatggggctaggaaatgtatgcattatacacacatctgtatctatttctacatttatctattgaattatctttctgcatatatattgaagactagaaggtcatattgatactttcacttccaatctaataacacagggttcattgtagcctttgtctttgccttatttgtaatttctttcctggctctcatgatttccaatatatttccttatttgcttaatcctagaacaaacataaagtagtttcaggattgcaaatccattcttctattaaaaacaaatttaaaaactagggtacaatatttgtgtactttttttcagccttaaaatatatagtcgaagtatacttactttttttaacctttgaatttatagtcaaaaatgctgttttacaaggttacttaatgttttagaccatatgtttgtttaaaagaatgtatctgaaacagtgctacaagccaagatgccattaaaggactggaaaatttgaagaatcccgaaagagaaaatacagatggattagactgatagaggaaaccacagcatacacacacaaaaggcatcacagatgacttcttgggaggttggggtgttgctcagggagttagaaactcaaaggccatgcattcatggagcttgttgggggcagggaacatcaatgagattaatgaaataattccatttattgcagtggctcctaactttgactgcaaattagaatctcctaaagacttaaaaatactgatgcttgaacctcactccaagatatctgaattagttcatctggagttaggcttagtaatcagtaaattcaacttaatatgttgccacgattgagagtcactggtttacagaaattgtgtttattgactttctatacctccctgggtaccagcaatgggctacaaatacattagcttactgtctagagtaatgagtgaggacaccgtatgtcacagtggagttagaacagtgttcccaaggtactaggaattcccaagaaaaactggaagcttcccatgcccagaaggcaagttataaacacagcacatcaatgtcagcccaacagtgaccatagacaagttattgtgatctgtattataaactaagactggtaaactggggttgccaaacaaaaagacacacagaaaaccaaaaggattaaacaggtaagaaaatccaccctatgagagagaagcaccaacatcaacatgcactaacaggaagcagaattaatacagcaaaaagacttaacaataagcaaaatttacatattcagataaagctgactgatctcactaatgaaaaagaaataaccaataaccataagtcttgaagagaaaagaaataattgtcaaagcagaacataaataactgtggaaataaaactcttgaatagattgaatagttgaatgaacacggctggagcaaaatcatgagctggaaaaggataacagaagggcaaagcaatgaaaagtaaatataaatggaaaatcaaagcagataggatagattgtgaaatttcaaatttgtttattggaagtactgaaggcaagaagggacagaatgaaaagaagaaaatcatgaaataaataatatacacaattttgtttacctaaaggcctttatatttagatttaaaataattgccagcaaagttataaagtaaataaataaaaataaaaagacccctgcctagaacataatgttgaaacctcagaacaccaaaaaagaaagaaaagtattctaaaatcttctggggaaggttcagggtgcaggtttgttgtttttattaatgatgctggatgctactatctaaaggaaaaatgaagaccttggagaagacctgttgaaagctcaaggaaagaagtatctttgagatggttcaggtagaacctagtcatgccaaacaccctagcaactttcccttaaggacatatggaactctgcctcgacaaagtctaagttcctaaagaactaattaattccttattttatttcatgttgaatgcttccaaatagcagatatttgtgtccaaaatagaaaatacagaaggattacagctttctccctctctagacaattctgcttctgaggaatagagtgaggagggtcagctggaggaatgaaataatgggatgtggcaaacaaggctcagtaaaagattcgaactgtgtccaccatgagcttattttttggtgcctctcatttgaccagtggtatgataacagagaattttttaaagtgtggatgtcccatactgtggccatatagtactataatctgcagtctgccctttcttccataaagtaaaagattatttgctcagttcttcttcagaaatgaaacttctagacttatgctgtctaatatggtggccactagattcatgtggctacttaaatttaaattaattgaaatgaaataagttgaaaattcagttcctcagtcacattagccacatttcaaatcacctgtgttcacatgggaatagaagctactccactggacagtgcagatttatggcacgtctccatcatcataggaagatcttctggacagctctgtaattcagacacctggattttgttatgtaccttcagtgcatcagtctaagctggggaagcaaggcaaggaccaacccctaagagccatgcttatgtggcaccagacaacagctgtcttcttggctctaaaaggctttgctaggatgcaaagctagcagattagttgccccagccttccaatctgtaggatccctacctgatttccaaacaacataacagtcaccaggctaggaatctaaaacataacattttgcccaactccagcaccattcttactcctactcctgctatgttgaatttgtgtttaggtcataacatacttttgcctgtacaatcaaatgtggtctcacacaagctacaaaagtgcaagtacctagtaactgctagctaatctataattctaaacaaaacaaacttattttcagatgaatgcaaatcaggatggaagttaaatatcatagtcactcttgcttcaccacggcttttgagtcatgggctcaatgtaaaaggaactgagcacttagggctgccaatgttatcaattcattccaataaacattaatgttctgaacaactgctatgagcaggcctgttatgtgtgatttaaagctgaaggcagagttatcgcacatagagtccttgagtctagcaggggacatagatgtataagcagttagttttgataacagtgtggtaagtgtcaaagtaaaggtttgcataaatgtctgggagcaaagaggaggatgtttagcctgaatgaagccctgagaagttatttgggggcaaaggaggggttgggggtggcagggcagggaacggtatttcagatagaagaaatggcatgagtacagggccattaagtagcacagggagttcgggacattctatgacatgtagaatccctgaaatataaattttaatccagggagtgacaagagtttaagtggagagacaagcaaggctccacagtcatattggcccttatatgtctggttaagggctttgtgttgatcccataggtcatggggcagcatgaatcagttttgagtagagaagtgacatggcctatctggtctaatttgtattctaggcaggtaatttgggtggtaaatggaggttagatttgaagggaacaagattagaggcaaattattgcatttgtgcagataaaagatagcgaagaaagaaaggctgtggaggaaaggaattgaaaggaaaagtgaactctgagaaacatttaagaggaagcaaaggaaagggtagaatttagagtatgtctcagattactgttctgggcaagtgtgtgattggtgtacccattcaccaagatggagaatacatgaggaagacaaggtctgggaaaaccattctgaatgtgatttcaggtatggtgaatttgaaatgcatgggacccttggcaaatatgtctagcaggtgtttgttatgagccctgaagttcagaggagaagacagcaaaacattccatgtgcttagacacaaagcaaaggcatcatcattaatattcattaatgacaaatgatgaattaatcttcattaagtcatgaatgattaattaatcttcattaatgatgatgcctttgtatttcttcataagatataatataatatcaattgaaatgttgatttaaaaggcagcatggtgtgtagaaatcagttcagactttggaactaagctgacttatattcgaaatcctattgctgaagctttaaactgtgtaatcatagataatttctctaaaatctcagcttccttatttctaaaataaggataacaataaaagactgttaaattgcctgggagaatccttctactacttccttttagaaataaaaccctgaaatttaggtgacaaatggcaacccagctgaaaactccattttgcaggtctttcttctagcaagtatggtgactggaattgactggaatgtggttggtcactcttgcctggaattaggggctttttgatcctaaaactaggaaagtcacaggcaaaccagaatgcactggtcaccctagcagaaagtgtgctatggactaagtttagaccagtgggagatgagtggaattaacatgtgaaacttccagggcatccccttaaagacaaattagcttttgctgaaatttcttttccccacttcctgctgctactacaactggctattgtaagaaccatcttgcacctagagatggaagccatgtattgaggatggcagtgctgaacaccagcctggatctctggatggccttgggaggcaaaatgctctctctaagccaggatgcctaactacctttgaactattatttgagagaaagacatacttgtgtcttattaagccactatattttgggtctcttctttagagtagtttaatccatactctaactgatacttgaacttactttgaaaagtatttaagattctatagcacatttaatgccacatttctgttattagtagatatttttccttaaaaaccatgcatgtggcagtattttcaatttcctttttgcatttttctgctttttacccttgggctcttctttggaattagtgggagatgataattttcttgtctatttggtaaagtgatggcctgacttacttgttttagataagacttattaggaaggcagtgaatctaaaaattacgtacatgaatagaaataaatgttctgaatatttacaatgtgtccacacttctatttaaggagtatacatacttacatatgacacaaactaaaataaatacaaggatgtttgggaaaagcacgctgccaaaccccttggtgaaagcttaccctcggtctgtctttcaacccaagagttgatgtcctttctgatttgatcagaagcttccacaaagttaacaggctgaggttctgcaccaaaatatgttttcatgtcttctaaatatttctgaaagacatagataaaaatccccttttgtagagtttgttcaaaattgagaaatcaaatctatttagattatcaaaagaactaggtaggcgggcaattgcacactcccacaccatcactccatcctctctttcctgactcccagttttggtcaaaaactaaacacctcactcttcaaacttagcagggcactggctagctatgcagagctccagctgtggaaggaagtacggatgcccacatttttggggcttccacatcctcttcctttctatttttatccatgccttgaaatgaggctagaatggaaagggactacaaataacaagagtgaccccagtggccaagaggtactgggcattgtacttgactttttatggtaggtatgaaaccaaagtgaggcttgtgatactggtagcttccttctgtggattctaaacaacaagaatcttgtggaggacccttgaagaaaatgatatcctgccatgaaaatggatttctaagcagagttgaatgttatattaggcattctgaggcaaaaaaaaaaaaaatgaggccttcacctcctcctggtcctctgatgttcacccagtggcagtcatcacatgtaggctatgactgagtttgctgttatggaggcatctgccttgggaacacaatttattcttcaagacattgtagtattccttcaatttgcttactttatgcagggcttgtaggagaaaaagtgatgagttaattctgttgccaggaagtggcttgaagattatgaagtctaaattctgtggaatttaaaatctaataaaaggaaaacttaaatatttttgagggaccactgcctgtcttaattcagggcttgtggacatataaaaatatgtttgtctctatctctgtgtccctcttgtttctaagtgcccactgagtcaatcatgtctcctacttctgcatcaaacgagagtccatgagcctacaagaaaggaaactgtctttaagattccatttggatgattttatgtctttagtaataacaaagctcaattcctgaactccccagaattcactagatttgaacagagatagcattgcttgaaatcacaaggtagctttattttatcttattgctattcttctaccctatctaatttccttgctctttgcccactggacacacgggtcctcctgcccaaagagatgttggacaatgaaggaaattattgacctgggttgtcatgtgaccctcttaacagaggacagagtcatcatggtctgcattggtggggtttcaacccttagtaaagaggagaggttgatattatttcatgtttcatgttcccaaagtctgtaaagtcttgatgtgaaaactcctcacttctctcatcccaaggtcagttttgctctcaagtagacagtctccagccaagtctccatatgtatttgtaggccattctcaggggctacctctttattctagacagaaatatctgattcctagatctgatttgagacctgttattggtttcctttaccactagacactcattggttggtctaattgattgtttgcagggaagtactgaccacatgaagattgtccctggatccctaaagaaatatacagagtttactgattggtctcacattgctctttcttttccattagcttaaaataagacatttgcacttacattgtgaaatgcatacgttttctctccatatatcgcattggctgttttaagtaagtagtcatcgttgggcttgaggatttctgagataagtgtttggaaatcagagtgtatttcttccgagttgctcaagttgaattcctttaaaagagaaggaactagtcaaataaaatgttgaacaagagttacgtacatgttagcaaactaaagctaaataaaattatttggggaattgcaaacaaaagttgaaaatgttcctaaagtggataaaaatgttttctttagtgttagtgcaaaagaatgaaatgttattgaggccataattttcttcacatttagtttgcaaaagcaggcaaggaaaagtttgaaactagagaaatttttagagagattaaaagggcgtggggacaagagatctttcaaaaggtgtagatattttgtattccaaaaaaagtttctgtaactttaatatatgtttctaagaaaaattacctgctaaaagttgcttcagttatcactaaaatacatgtgctaaaagtactttttccttaattatgaaatatatattaaaggataagatataccattttcctttttttttcactttcagggtcacatttgactccctggtctctgttaaattgaagcacctgtaatttcaataaaaatacaaatgaatagactgcagagaagtaattatataaatcatacatcatctgtaaatacaagtcagtcattcctataattgcagaacatataattagttaaacaaaggggctctgacttgacttaatgtgtgtaataaaataagtcaagaactgctcttaaataaattttctaaagtcgaatttaagttgctagtctctttattttcctatgttttgtaactagaatgatgttaggaaaaccttgaggtaaaattctcttattttccgtatttcctttttactcatggttgttttaagaagaatgctaggtgtccaactgagaccatcatttagacagtttaggtaaaagccataattatgtggaaaattaaggaattttagttgttttttttctagttaaatgctcagttcctattgtctaccaccacttgacatatttaggcgcaatgtttgtgtttaccccagcatttcactggaaagttaacaggaaagatgtagatactcttctttccttggaattgtacaacaatagaacagaaggcaatacttttatctgccaagtcctggacccggctgacaataagaaatacggtatactgcttcaacggttgcattgacccatgttaacagaacaagggccacctgccatacataaaggggtgcacagttaattcatgaggcccatttgcaactaaaagtgttaacatccgaaacaaggacaagcaacacccagcaatatatttatatgaaatagattcacattggaatccacttaagattgtctatcacattaatgattaagacttttgagctaatgaacctgtcattaacaagttgtgaacaaggattttgttgttgctgttgttgtttttaaaccacctgatatcttgtgaactacaagagtaaggatgttatcccaagtccagactaatatagcatgtgttctgcccacttccctcagaattaccaaccgtgttcatatccatactttctgaggaagtcaccttcttgggtgaaaattctgtcatttggccttttggttttgcaagatttagggccgagtttactccttctgtttttttttttttttatttaaaatcacatttatatatacatattgttgcatatatatatgtattcatatatatttttacacacacatatggctattttgctatctatgactacatatatatatttacatacgcacaatgttttgaggatgcttattgcaaaaatagttctgtatataatagtattatattgttattgtaatgatcttaatgggctccttagattcattcagataaccagggactaaacaaagagagaatcaaacaaagcatgagaaacagaattcttttatttttcttttttgtgtcttcaagaaaatccttatgtgattataaagatgctgaataattctattatttaaagtttgaccaattactttttgaaataatatcatcaaaataaaattggttttggtgttgaacaaaaattgataaccttatcctttctccattttattttgctaaaggacacaggttctcaaatggttttcctagcaacagtttgcaaattgattctctttaccaagatttgttttatggtatagaatgttttaatgtatgtcttgttttagagaatgttattgtgaaatgtaaattattgagttgtcaagagaaaactgaagttaaaaggcaatgaaagcacttagcttacaagaaacagaagatagttgaccttttccactcacctgggccatttgggctgcagtggtacctttggcgcccaaatacactatggtcaaggaagttgagatgctccaggaagaaaagaagatatttttaccctgagcagattcagctagctttttgctcaactccagggcaaactggttgattgatgttgctagagagtccattgaggaaacctaagaaaaataaagcaaaaattagagagcatattaatatttatttccacttcacctttgaaaaaatatgtattcatagttgcatacatatccatatacattgtcatatgagctgaatagactttagcaaaattctagtccaataatagtattttatatattaaaacactgaagtttagagaatttacgggaattgcctcaaattttagtgctaatgtgcattagagaataaatggatgctggtcagttaaaagctgagtcccataacatagtttttgccactctcttgacatttttcacaccaccagttttgtttccatgtgtttgtatctagtttttccaactccagcataagcttattgagagcaaaatattctttttatgctgcttcgtgcacccaacagcacctagctaaggattttgcacaaaatgggtgcttgtaaatatttattactcatttacgatattcacggtttgggctgtaactaccatttttaatttatgcaaacatggaatcatgcacaactaattggaaaatgcttgtagagaaattgagaagttaagactgtttgtctttattctcactcatttgagaccctctgaaactagtcttctggaacaagagtactcagttttcctcatcttttttgatattatactcaacatctaaatgtcatctctaatggaagcaaccaaacagctggccagcctaccacacctgcatgtacctggcctgaaaatgacaggtgccccaatccacagcaaatgtgcaccaccaccactccatcacaaacactcacagcttggaccactgaggcaactgcagacattattgatgaagactacaactgaggaaactgcatggatattatgctaccaagtccaccctaaaccaaagccaatataccatacccaagcaataccataatattttaatttaaaagccttttaaaactaggtttctatagttaattccatctattttgattttatggcaaaataatttctcgaataagttaaacgatttaaccaagtgctaagggaatctgttactgctagaccagccttacaagaaatccttaaggaagttttaaaaatggaaacaaaagaatgatacctgttacttaagtacgtagcacacacactttataaagcaaccacacaatagaaaccacaaagcaaccagctaataacttcgcaataggatcaacacctcacatatcaatattaaccttgaatgtaaatgggctaaacaccatatttaaaaagcacagagtggcaagttggattaaaaaacaagacccattaatgtgctgtctttaagagacccatttcacatgtaataacacccataggcttaaactaagtggttggaggaagggctatcacacaaattgaaaacaaaatagagcagtgggtgctattcttatatcagatacaacaggctttaagccaacaaaagtaaaaagtgacaaagaagggtattatataatggcaaaaggttcaattcaacaagaagacttaactatactaaacgtatatgcacccaacattggagcactcagattcataagacaagtactcttcaacctacaaaaagacttagacagacacacaacaatagtgggggactttaacaccccattgacagcattagacagatcattgagggagaaaactaacaaagaaaaacttgaccaattgaacttattaataaacatctacagaatactccagccatcaaccacaaaatatacattcttctcatctgcacgcggaatatactccaagattgattacatgctcagccataaagcaagtctcaacaaatttttaaaaactgaaattgtaccaactatactctcagaccacagtgcaataaaaatagaaatcaatgccaagaagatttctcaaaaccacagaattacttggaaattaaacaacgtgctactgaatgactttttggtaaacaatgaaattaccgcagaaatcaacgtctttgaaatagacacagagacataacataccaaagtctctaagatgcagcgaaaagcagtgttaggaggaaagtttatagcactaaatgcctaccttaaaaagttagaaatatttcatattaactatcgaacatcagacctagacgaactagagaaacaagaacaaactaatgctaaaacttccaaaagaaaaaaacataagtaaaatcagcaaaactgaatgaaatcgagacccaaaaatccatacaaagaatcaacaaaaccaaaagttggttttttgaaagtataaacatgattgatagactgcaggctagattaacaaagaaaaaaagaggagatataaataagcacaatcagaaataacaaaagtgacattacaactgatcctggagaaatacaaatgatcctcagagactactatgactacctctatgcacacaaactagataatctagagaaaatgaataaattcctgaaaacacacaacctctcaagattaaattaggaaaatattgagaccatgaacagatcaatatcatgtttcaaaattgaatcaattataaaatcctaccaaccaaaaaacgccctggaacaagtagattcacagctgaattctaccagatgtacaaagacaagctggcatcaatgctgatgaaataatttcaaaaaattaaagaggagggactcctctctaactcattctacaaagccagcatcatcctgataccaaaacctggaaaaaacacaatagaagaagaaacctataggcaaatatctctgatgagcatagatgcaaaaatgctcaataaaatcctagcaagctgaatccagcagcatatcaaaaagttaatttaccaccatcaagtaggctttgttcctggagtactatattggttcaacatacagaagtcagtaaatgtgatttaccacacaattaaaaacaaaaaacatctgatcatctcaatagaggtggagaaagctttcaataaaatccaatatccattcatgataaaaaccctcaacagactaggtgttgaaggaatatacctcaaaataataagagctatctgtaacaaacccacagccaatatcatactgaataggcaaaagctggaagcattccccttgagaactggaacaagacaagaatgcctactctttaccactcctattcaacatagtactagaagtcctggccagagcaatgagacaagagaaagacataaaaggcacccaaataggaaaagaagaagtcaaactatctctcttcattgactatataattctatacttacaaaaccctaaagactccaccaaaagcctcctggaaccgaaaaatggcttcagtaaagcttcagaacacaaaatcgacgtacaaaaatcagtaccatttctatataccaataacattcaaacagggagccaactcaagactacaattccatttatgatagccaaaaaataaaataaaataaaatacccaggaatacacctgatgaagaaattgaaagatctctacaaagtgaggtaaaaaaaaacactgctaaaaatcataaataatacaaacaaatggaaaaacattccatgctcatggacaggaaacatcagtattgttaaaatggccatactgccgaaggcaaacctcggatggaatgctatttccatcaaactaccaacgtcatttttcacagaattggaaaaactattctaaatttcatatggaacaagaaaagagccccaatatccaaagcaaccctaagcaaaaagaacaaacctggaagcatcactttacccaacttcaaactacactataagcctgcagtaaccaaaacagcctggtgctggcacaaaaacagacacataggccaatggaacagaatagagaacttagaaataaagctgcacacctacagacatctaacctttaccaaagtaaacaaaaacaagcaattgggaaaggactctattcaataaatgatgctgggatagctggttaaccatatccagaaaaatgaaagtagaccctacttttcaacatgtacaaaaattaactaaagatagactaaagacttgaatgtaagatctcagactatcagaatcctagaaaaaaaaaaatccaggaaacgccattctggatatcagtgttgggggaagtattcatgactaagtcttcaaaagcaattgcaacaaaaaacaaagtgagacctaattaaactgaagagcttctgcacagcaaaagaaactatcaacagagtaaacagacaactacagaatggaagaaaatatttgcaaactattccactgacaaaagtttaatatccattatgtacaaggaacttaattcaacaagcaaaaaacaaccccattaaaaaatgccaaaggacatgaacagacacttctcaaaagaagacatacaagtgggcaacaaacatgaaaaaatgctcaacatcattaatcattagagaaatgcaagtccaaaccataatgaatactaccttgtatatgtcagaatggctattattaagaagtcaaaaaacaagagatgctgatgacgctgtggagaaaagggtacactgttgatggaaatgtaaattagatcagctactatggaaagcagattggagatttcccaaggaagttagaactacccttcaacccagcaatcccattactgggtatacattcaaaagaaaataaatcattctaccaaagagacacacacacacacacacacaagtgttcatcacagcactattcacaatagcaaagacatgaaatcaacctaggtgcctatcagtgttggattggataaggaatacctggtacatacacaccatggaatactatgcaaccgaaagaaggaattaaatcatgtctcttgctgcaacatggatgcactagaggctgttatcctaagcaaattatgacaggaacaaaataccacatgttctcatttataagtgggacataagcattgggtactcatagacttaaagatggcaaaaatagacactggggactactagaatggggaggcagagaatggagaaaagattgaaaaactaactattgggtactatgctcactacctaggtgatggactcaatcaaacctcaacctcagcatcacacattatacccttctaacaaacctgcatatgtaccctctgagtcaaaagtaaaaactgaaattatttaaaaaataaaataattcaaattcttatacctaggaaatctcattaatgccaaagttgtgtagagttaggtcttgcatgaacgtcacctggccttctgagaaacctagaatgagagctttggaaaacgtcaggaattctctatactcaaataacttaatcatgagagaggcatgtgtagacaaagttttggtttcatcataacttggagttaatagtgatactgtgggaatcccccctagccataaacttacacttaaccaaacagcttccccacctctaaatcatgccctaggtgtggctcctgtctactccaaaagcttatgataatcccaggctgacattatttgattaaatagaaaacaaaaaagactgtagatctgtagtaattctacactctcataaaatattgaatatttgcctgtgactttcttcctcaacagatcaaatgccatcttcaaaataactctgtatttcctttaaggctcttactcattcaaataacattttgttacctgcatacagtatatatcaagctttgtatttttaaaactcatgaattaaatttacacggaaaatgtttggtttttggccaaaccacactcttcatgaaatggggagaaagtaccatttcagaggctggggtttttctacctcagtgtatggttattccagtgtttatttacttgtaacatgttcctgaaaacaataattctctattataaaagctaatttctcatgtaagcttaatatttagttgtactcatcttcattaattcccttattaatatcattatttgtatatcagatgttacccagaacatacaagagaaacaattctttattttctttttttaaagaaatctaatgaagtactaagccatccattagtgatatttaacccaacaatgaaaaatactttctgaagggtgtagaattgtgaggtgaaattttacaggaaataattattccatacaaatgttggacaattatattttcagagaagactgcaaatgtgtaggtcagaagtctaccaggttattttcaaaattaattgctcttttgcagttttcaagagctataaactgatcatctatgagcttaacctgtagacaggctcagaggagaagccaaagagaattaagaaagcaagaaaaggatagtgtcattcatcaaaatgtctcatcatagacatttcatcatcgcatgcccctagcacatcagtgttggaaagacccttagaatctccctaacccagctcccccattttgtctgctaagaaactgaagctgagagaggttgattgagcaaaggatgcacagcagagtcaaaactgcaactgtgttatcttgactgtgaatacagttgctcttgccattgtatctcattgtgtttaagattttagtggctaaagagagagattacatgatggagaaccatcaggaggagaaagaagatctggagagtggggaggattcttgtcccgttttccatgagacactcccaagggcctcttgcctttctgatgatactgataatattacctcctcatggagttgtgcatatcagagaatgacagcttccccaatccccagcacctctctattcacctaaggccttttttagaaacaggtaatagtttggggtggtttatgaagagcacctagtatgatgtgggggattaggaacatttattattccacagaagagaagaaagctaatggcccatgaaatggtggccaggagaggagagtggggttttgggtttgtgggggtaacagttaaagagtcaaaccatgaattccatatattaatgaataggatccaaattcagggtgccaagctcacatttcctaaagagttgaagggttttggctcaaccgtcctgagagaatattttatttatctctgcctatgttgacagatacataaatgtgactggaggaaactccactgatgatttcacaattcccagtaaaacaaggagcaaattccactccacaattcctagaaaaacaatttctctaactttttttgggaatgaatgttctttctcccatatccctttttctagtacaaacttcaaaccagctcaggttactctctgacttatacagacaaattcttaagggattgggccttatctattatttctggacttttttgggggaaggggtcttcattatttgttacctagctgggcacttcaaccaagaagaaaaacataaataaaatcattaaccaaagaaatatttacaataccttgttttctcccactggagcagaattggcaatttgctcctgtagtaagagattgtggctgaagagttgagaaactttcaactgaagaaattaaaaaaaaaaaaaaaattttagcaccttccctgttcttagctccaccctttgattcagtttcacaagcatgtatactctttctttcaggcttatttttgtcagaagtctcaataaaaagacagaaagagacagttaagggtttgcctgagttgtttagttactcacattttccatctctgtacacatgagagacctggattctgacaaattgtaactcatcctttttttgcttaatcctttctctagtctgccaacagagaatatttggcatggttttcccaggtagtattttttttataaaacacaaatagaaagcttcaaattagtggaataataatgatcaatgaaactgaaaatattactgaattattaatttgtgttgtgtctgttttgttttttctagaaatagggtctcactctgtcacccagactgaagggcagtggtgcaataatatttcccagcagcttctagctcctgggctcaagtgatcctcccacctctggcctctcaaagtgctgggatttcaggcacaacccatcatgcctggcctttattgtaagcctgttaaaaatggctctcagatactatgtgaaaggcaccccggaagattttctgttctcatttagagcattggtgtagaacccagagcatcacttgaatgactgggatgtctgttttccccactagcagggacaagggttttggatcaaaattttagacaccattattgggtcggatgttagttcatcattttctggttctcttttatttttcccaaggaatgctttttcactccttatttattacaaaagaaaaataacaggccatttgtttcatttgcatgtgtatggaggaaggcggggagggtcatggggagagggattggaacaggaagacatctccaggagggattaagacaaagaaggagcctctctatttataaactattttatatatttttctcacgtagttcctgtttttctcttcacagaggcatacttattttctggcaagatggctcagactttaatatttgaatgttgatatggaacccagagcaaagtggtactctggatttcactagggaatgagatgtgtgctagaaagttccatgatgcctgcccaactttgcactgagcagatatgattatccaaggatgcctccaggactgctattagaaaaagcatcatatggagcctccagatagaaggactgctcgccttgactgacagcagtccaccacagtgacttgggctgcaacaccacccagcatgaaaacttgcttgtgttgcttatgttatagtaaaggcatcaatgtagattttgcggatttatgcaacaaatggtttcatcttccctaaagtcaaagattaagttttattcattttttccctcaaaaccttctccagatttcttcctcacttcttgattaaaccccctatgtattaggccattcttgcattgctgtaaggaaatgcccaagactgggtaatttgtaaagaaaagaggtttaactggctcacagttctgcaggctgtataggaagcatagtgatggcatctgctcagcttctggggaggcctcaggaagcttataatcatggcagaaggcaaaggggggggcaggcataccatatgatagaagcaggaacaagagagagagagggttgggggagttgccacacacctttaagtgaccagatctcatgagaactcactatcatgaaggcagcaccaagccataagggatcagcctctaggatccaaacacctcccaccaagccctacttccagtattggggattacagttcaacatgagatttggtcagggacaaatatccaaactatatcaccctacgtataggtatactgcctacaatagtaaaatcatagctgtacattattttgttgcctgttgggggactaggaaagagaaaggggtaatcatgtacaaagttaataatacagtattattagaacaattttgtttgtttgttgtttttatttatgaccctgtgtgtatactgcaatatgcacatatattactagtaaagacagagaaataggagctaaatgaatagggaacaggagtggaaggaagacttttcactctagtcttttttatgatatttgatgtttgggccatgtgaatttattaggtactcaaaaaatttggaaacagagagaggagcatcagatgcatcaatattatcttagtaggaatccagaagaagagagtagatcaactggcgccaagcaattgagtagataattgctgtcttagtcggttcaggttgctatgacagaataccatagattgtgtggcataaactacaaacatgtatttctcatggttctggagactggtaatctgagaggggtgtttccacatggttaggttctagtgagggcctcttcctgattcacagatgactgctttcttgttatatcctcacatgacagatagaaaaagatctggtgcctagagctccttatgagggcagtaattccatcatggattctgccctcatgacctcatctaaccctaattatcttccaaaggaaccacctccaagtaccatcacacttgggattaaagtttcaacatattaattttgggaagatatattgagcccatagtgagggctgaggtttcccagaactgaaatgagatataagtttccagatagaaaattcttctgctgaacaggataagctttttaaaatatgatttaaaaaatatccttaatgtaatgaaatatcaaaaaaatcaaaaacaaaaaaatgaaaattataaggggcaagaattatcttaacatcaactttcctatcaacaattttgggtaccaaaaagacaataaaatcataccctcaaagtgctgaaaagcacttggaacccagaattgtatatctatactctaactcaataatgagagtgaaatatggatattttaagactcatgataattcacaaagttaccacctaccaccttgcagagttattaaagcacatagagaaatgaaattaaaagtaagtagaagaatgcaagaaacagcaactcttaattttcaggaatgtctgattagaagaaatacaccattattcaagccttaaaaagttaactgagtaattttctgggattcgtgtttgaccagcttagagtgagacagttttattactgacaaagataagatagatcataatcactaatatttattaaatattatatatgccaagtattcttttaattgctggatatatatgaactcatttagtcattatagcaatatgataaaaacagttttttctttagttttcactgagagaaaactgaagcacaaagaagcaccatggttggcctgtgttgaagctacttgtaagtgttacaactgggatttggaggcagagagtctaagtcttgaggccacttttttagctaccatgttctagtgcatcaagcatccctgcctgccatcaaagggagtgtgctgcatttccaggatccagccgcacttctgcagccagactctgttgttcaggcccccaacctacaatttgccttatttctcaggtcttcaattatgttctcctctgcctctgactcattcaaaagcattactgctattagaaacaaacacacttagaaagagccatcttatgtttcccctcctgctcttgcacccaacccatctcccatcttcactgcttgcaactctgagctcaatgactgaggccttcttctgtgtctggaccactggacttggtcattaatcctggtgtccttaatgtttagacagtggtttccccaaaggactctaacctagactattctgaattgctatgtctttgctgctgtgagaaagcagctctaacccatttttcatacaaccccatcccactgaccctcaacattgggtctttttgaatgaaggttgttatgtccttggctccttcatcctgtctattttttctgagttctcacaagtgagtcataatgctcaactcctaggagtcaaggtctatgatctgcagacctaatgaaatgacaacaaatgtattgttgtttggaagcaggtttatttattatatacttgcaattgaatataagatacagacatatatatgtgttatgtatttctagaaatgcacataacatatatttgcctattgtttaatgttttttccagatatttattacagaagggcatggagggatacctacttattcttcattatgagaacaattaaaggcatttattagataggaaattaacagatcatctgcttctataactttattagctacattaaataggcagtgagcaataatttaaaaactcaccattatataaaataataaataacaaagtaaaagttaatgttataaaaataaactgatagtaaggaaaatctaaatgggcatgatcccattttagaagaccaaatgattaatagggttgtcatgttataatagacaattgtctaattatttctgtgtttttatttagtgggtagcagaagttgttcagaagagcagaaatatgtagaaaacatctctaaatttttggcaatttgaaatagcaattctgaggcacacagctcatctacaaaaatcttttgcagaagcagcacgcttagttttagggtgaggaaaatctgccgaaaaataaaatgcagttggttatcttatgcataataagaaaaagaaaaggatgatctgccacaaactgtgggcctccatgtccagttctccctgtcataacacctcctgtgccagcggctgcttcagtgccctcctcattcacatccaccatggcttggtggaacacttcagaaagaaacaggtcattcctctccgacatccctgagaaattggcccgtcccttgttgaaggcgtcctccatgcccatgcttctcagaatggatctgagttcataatgctcttctaatttgaactggggtatgtatacctcaacttcatcttcagccattttgtctttgctggtccacttgttgagtttgtcataggttatttcactttccagctgcaaagcaaaacaaaacaaaacaaacaaaagaaaatacagcaagtattagaaagaaggaaaacaactttaagtctaatattaaaaatcagtgactttactatattgtgggtgatatagaaagttaacagattggtcagatttttacaagaaggtaacacgtatgacatagttaaggctttgaatgaaatgtagaggcatgccatatttactatcaactgtttcatatatttccatgagaaattaccacaccatttgtaaggagtatatattcatctcatctcacgaaaggtaggtatagccccagaaacttaaatatctgaatgtcttaccagctccaagccagtggacacatcggcaatttcatctggaagcaacaagaacatgctaacatctccagcatatgggagttctagaatctgagcctttaggtcttctatgtatccaatgtttagcttttcacgcaagtacatcatctgtacaggtgtgcgctgagcctaatattattaaaaggtaaaatatggaagtcgattataagatatcaagagatttacaattagacataaaggaggattggttctactttagtgtaggataaatgtgatttttttaaatcaacaaaataaattatttgtacatccttacagtgggtactctgatgttattagcttgttcaactttatacccattatttagtaagatggacaacaatggtaatgacaaccataattctaaaacacttgtttagttcttactatgggccaggaaccgtgccatgtctcaatatttacagccctttgaaataagtggtagagccaacgttggagtctgggcatgtataattaaaaagccacagtcttcccctttacctatactgtttctaaagagtcaatcaactgtccaacatgcataacttctaactagcaagtctataatgagcggtctctaatttttctgtctatatcttgtcaaaagccctaaaatatatgctaggaagatgtattttgttgtctcataccgagtttacacggaaaggataaagcccatttagtttcttctcaaatggagttttccactttcctttgaagtagacagcattcaccaggaccatcctggtatccccatctacagaaccttcaggtaacaagtttgggattttgcctacagaaaacataacatatatttaggtttcataatcaagaactgtgaaattacttactgaatcttctgagtagccatcaaactaaattcttcaaattgcagagttgttaatcttcaagctaaagttttttaggtttatttaaagcaaaattaaaattgaaacaaatttcccaaaagcttgcaaaatccaagaaaaaatgaagaaataatgcatttaaaatttagaccgcctatcaagtttggaatggagattttcactcccttttatattcttttctcaaagcttggcagttgaaagttattcaaatcagagggaagtgaaagagaggttcttagggaatataatagtgcctttccaaaatatatcatgtactgctagatctggtctagatagtctgaggatctgacttactcatttattcaaaaacgttttgtaaaaaatatactagacctaaattaagagtagtgcagatacaagagatgagaaaggaagaattatcctggatgagcctagaacactgggggagacattcaaaatcagttgtgaaaccctgtgtgataacttctgtaattgagctaaataatatattgagtactatgatcatacagagaagggagtgaaggagtaagcccgagaagattgacagaaacaatgacaaatgagtgtggtcatttaaaaaaatgaaattggtttaagaagcagtttgtttatagttagtactcgctctgcagtattccaagcatcaaaatatattattttgatactctattaggtgggttttattagtgtcattttatgcaaaaggacaccaccaggttagcagtcttcccaacgttacaatgctggtaagcttgtaaaaattctgcctccacagtcaaaactactgacaaatacaagactcttaacaaattaataggtcaatgtggttttgaagtaggaggtgggacctgactctggaggcaggttttagacaccaggccaaattgagggctagctaaaatggggaccagggacaggatggaagcagtgtaccatgtcagtttaccattgtgatggcaacaccttggagttaccacctctttctgtggcaatgacctgatgacccaaaagttattccccgttccctagaaatttctgcgtaaactgccccttaatctacatgtaattaaaagtaggtataaatatgacccccaaactgccctgagctgtgcctctcagcacagtgcctggggtagcccttctctgcaggaggaatcatggagctgtaatactgccacttcaataaagctgttttcttctaccctacctccagctcacccttgaatactttcctgggtgaagccaagaacccttgaaggctaagccccactttggagcttgcctgccttgcatcagtttcatcttcaatgtattcatttaatatatacattcaatatatttcccaagctattaaaatttttggttagtattggggtatagtaatgttgtgatgtatatgataaaactagtatttgatcatagcatgatgaaacagacaattctctccaattcttacaaaagctggtaaaacaatctgccaaaatagctgcttggcattttggcaaaataactgattgacttacagccatttagcacaatgtctaaagagaaaaacaattcatgccattctttaaagaaggcaaaacttccatgtgtctctttaattttgctctccatttttacttgaacttttgatttaaatcatctttctctgcttcctttgtgtcagtggtctgtcaatattttagaacagtatttcacaaatccacaatgaaaatgaagaactaaaaggaaatcaattattttcagataaacaaataaatatatattttttgaaatcccatagcacttagtttatgtgcattttccattgtggtaattaataaagcaagacaccaaactatttcttgaaacaatgtcttaaacataagagttaaatgaaaatccttaaaaaaataagttataaaatttttaaacatccgattgaggaattctggagttagactaaggatcagaagaagaagcaaccctggctttaccgctaccagtgggatcttaggggagccggctaatcccctgggaacaggatgctccaaccacaaattggtaagatggataggagctctcttaggacattttcaatcctaacagatcataaatgaatgaaatacttacacaattctgaattcataatcatctctgtttcttagaaatacatttatatgttattattcagcaattgtttacttaaggcctacaactctacctggaaattcagaagaatgaaggattttcactgtcagcaaaaaactgtgcaaatttttgtgggggcataggataagtgtgacatactggacctacccaaaaataattagagcctgagaggaaaagcaaaacaaactaacaaaaatcagttccataattgtttaaggccatatatggctaacactaatgtgacttgtgaagctgaaaaagcagatgaggagatgagaagaagaaaagatcaggaagtaattgggagtcacttccaggaaagagtaagactttggctgcaatttaaactgcaacttaaatcctgtagttgaggcatcctcagaaacaaagtctagaggcagcaatgagtgtttaaggagctccaagggccagtggtagccaagcacagtcaactggattactgagaactcagaagtcaaggtaaagaatgagaccttctcctgaggacagtaggaggtcactgacagtttttagtgtgggaatagcataataagtgtactgcatcacctctttaatttcacctccttcccttggccctccacactgcagtcagaccagactctattcttctccttagggttacctctggacctttgcatattctgtgcactctgtctggaaatctccccccaggcatgcaccctccacctggccagctccagcctgtcttcccaattacaatttaatcatttttaaatccagtcagatgcctttcctgtgtactcccacatagcacctgtacttctcaatgaaagcactgactactactctatagcaattgccaacatgactgaatccctcctctataggctctatggtggcaggatttaccatttttatctttatctccacatatagtttctggaatatggtgtgtggtggataaatatttgttgactaagtgaatgaacttaatagaacttaatgaatgaatgaattcaatgaataaatgacttaataaactaaattacaatgaataaatgattcaattaaataatttattcattgtaaaatatacagagggaggcaggagcctgtgaaacaattaaaagcatgagttaaaatggtagacgtgacttagataatcaaggagggatgaagcagagaccaaaaaaacttgacaatggattggctttgaatggtgaaagagaagaaagagtgaaaataattttatgattcttccctcctccactgcctgtattctttatagctcacaccatttactaagctcagggtcaagccttgttttctttttgtccacagtgggcatagactcacaattatttcaatgctgatatttcctattttgaaagcttctgcctcctttcatattctatcctcaagcaatatccaaaatcaaatatttaagtactaaacatatgtcttctattagtaggcctcaattatttcttctcagttaaaacaccactgagctaatcaggaataaattcacatccaccaaagtaactgcagttggacaaattgtaaaggggtgagggctaactaagttcatggatggaaaaagatagatcagagttttctaactggaaagaagtaaataaaatattttcttggatttacctttggtttgagtcttgacccaggaattaatcttttttctagcttcttctgcacattctaggaagtctactgcctggggttctgaggagtaatatttctgacagagtcgaatatattcctttaaagcaagaaaatgacaaaggctacataaaatacataccaaacaagccatggcataatggtgaattatggtcttcccattgaaattaggagacctggggtagggtgggagtggaggttggctatggaaggcaggtgctgaagggggaaagagtgcagacccctttgtccacgcttactccccaactctatccaccctcttgtactccttgcattatagagacagaataaaaggaaagaggtttgacttgggggatagtgtctctggaaaacagttgcatttgttttcctgatttatgactctgagattgggacatttgcaatgggaagaggaggaagccccagagggtacaggaagggcagctgttacgcaaggccagccctagggagctggtgtggaattccaactctgcttttatgaactgttgaattgtagagaactgctttgaaagtgacttcattacttgtttgggatccagccatttcaattacaggtttcacttacttcccggaagctcgcagacttctcaccaaacagcttattgacactttccagtaaataattccctgtggatgcattgattgcagagctgagagagcggaaggatgaatggattttatctgcagcttgtgccttgaaaagaaagaaggaattctttatatataacacagaactactaaacaagatagttcttaagccatggtaatagtttttgaatacaatcatgaaatgctatattaatacatactttatttttggtacattagaggaatctttgagaaaatcatttcgataaggatgtggtacattaaaactaataaggtgaattttaatttctttccaattttgctctgtctatggattggatttaaccaggtgaccaacagcctagaagaaaggccccttctcagtttcctaaacttcaaagtctctaaggaatttttgttgtatttataagatggataagttctggggatctaatgtacagtataatgactatagttaataagattgtgttcattaatagttatagttaataaaactgtttacttgaaatttgtgaagaatatattttttaagtgtcctcactatacatacacacatacatacaaatggtgggtaattgtagtgatggatgtgctcattaatttgactgtaatcatttcacaatgtataggtatagcaagtcatcacactgtacatcttgaacatgtacaatttttatttgtccattatacctcagtaaagctggcagggaggaaatgttgccttagtaatgatcttacaaagttcatatagcttctctagatacctattttatggggcaaactatgcagtggaaaacatgggttttagaaaaccacaaaagtgaatggttatttcagttctcaaactgaagtttgtaagcaccatgtcagacacagggcttggtcacagcagcagcctgtcctagggcaggggacagagccctcctgatggactgccaggtaccacagaacacctggcggaatctccacatgatcaggatcctgtccacctcctctagcccataattccctgggcaatgggtagaaggagcttcagagtgcccaggaagagagctttgggagatacctcttcataatctacctcataagcatgactgtggaagttggttgccaacaggagcagtctatactcagtttttataatttaactggatagctgacatttaaggaaatggagtactgaggaaaggtgttactccccgagatagctgattgataaatagataagatagacagatgacagagaagatagatgataaatagatgattcataaaatatatagatagataggattgatagatgtatgataggtaagatagatgagagagatcaatgatagatgatagattagatagatagaaggaaagttacctgaaggtcagtgatttctcatgcaatcattgggcccagccttctgccatttctcaatcaattgtcagtccctaccctctctcctctggaaatccttatccatacacgtgtattctaggagtctctactgtggatttatgataaattacacatacctcaccaatgacagagaggcatgagagaatttagaagtaaataggcttggcctaaaactcatgaagtctggattctgtcctggctcgtctctcgttatgggtatcatcttaggacatgtttttcttaatgactctgagtcttagttttctttctgtgaatgggggagggtatattcgcttccttcccagtctgacactgtggctttaagacaggaagattgcaaaaataaaccacaaaagaaatttggaccagtaagtcagatacctgcaaaatcgcatcaggataactacccttctggatctgctgcatgaacccacagctggtaaagttctctggagtcatgggggtaactgcattggctcccacttcattaaactgaagcacctgcaatcagaattagagaaaacggttacacttgcccacggatttactgaacttttaaaacagatggctatcaggtggctctaaaatggtcctagatcttttcccttcccttatacatggggaacaaccatagatactcaatactctttctgtgtaatataaaagtatcagccaacctaaatttcccttatagaaaacagcatgaggtgttttagattaatttatatcctggccattttggaaaacaaattgttattatgaaatgatttaaaacctcttccccaaattatctaaattatatccaaccaataaatggtcttgaaaaaaaaatgccagtattttaaagaaagtcacaagattaactcagaaccttgtgtgtctctctcttttcagtggccttatacacaaaatactttcaatctgtcaaaaactacaagccagagtcagctaaggcataaaacaggtcatgcaatattaacagggttcacctaaaatatttacacataccatattcatacacagagaaatttatgtccatgtgagggacaagttggtctgatgacactgtgaatctcttcgtatagtaagtaggcagttttggctgacacggggaagctggcagcaaggactgtcccctctgaagcttcctcagatccccttcccacaacactgctgcctgcccgccttggtctgccagtcttaatacctgcaagctggccctgcctcccagccacccaccccatcccacctccttgggaacccttggtcctgcagcacctccctatggggtccctgaggagaagctgatctggtaagtggcttgatggttggggttctgctaatgaagttaattaaggcagccttgtccagcaagttggtgaatttctgggctagaaggagaggtgttagggtttgtgaggtctttttctgctctttgagtcatacatcgtaagtcctgcctagtactctctgaaaagaagtggtgcaactccaccctcacgtaaaagaagaagatttcctacgacagcttggctggttttcctctcttccaaggaaattgacccttaaatcagggttctttgggctagcactaaagccttcctgaatcagtgttaaagtcactcagggagatgtccctgcaaaagtgggactgtgagctgcccctagtccacacaaaggccacagagaaaatagtgaggcagtttggcctggatgggtctgttgcctcactgtaaggaaaagagcttatatcctaattcccacagacctatgccatccaggagcttatatcttttatgtattcttttctttcactacaaatgtaccacttctaacagctacagcaattctcaactgtgtggcctcttcttgccctgattccctcatctgtaaaatgagtacggtaatcatcgtacctacctcataatattttgtcttatgtgagtaaatttataagaagttcttagaaagatgcctggctaaggcactaataagtattggttgttattatagcaactgctactaagtgccttacatagtacctctaatcttcacaactttcttgcatgctacacatttttattcccattttgtagatgagaaaactgagatgcaaatggtttcaatgtcctcacacacatgtagtaaggaacaaagccatgactcaaacacagatacgtctgtccccaaagtctgtgctgctttctccagccaataaatgtctttttctttttatctgggaagcaatcatattaacatttgaatttcaaaatctacacatgcaacagagttgtcaaaagacgatatatatagagtctcaaaaaaaaaaagactatatagaatcctcgcatagtcccaaaggcttaaagcacttcttagacacagaaaagctgtcttgtgtccagagcaatcagtttattttcctctagtaccaaaatcaagatttttactttaacaacccagagcacttcatttagcatttgctcccaaaatatattgctactgattcctttacatttaaaaaacaaaaaaacctaggccgggtgcactggctcacgcctataatcccagcactttgggaggccgaggcaggtggatcacaaggtcaggagtttgagaccagcctggccaaaatggtgaaaccccatctctactaatacaaaaattagatgggcatcgtggcaggcgcctgtaatcccagctactcgggaggctgaggcaggagaatggcttgaacctgggagttggaggttgtagtgagccaagatcgcaccactgcactccagcctgggtgatagggcgagactccatctcaaaaaaaagaaaggaaaaaagaaaaaaacctaagacctgatgtttctaaagcttttgtgccaatttactatctttattctttcaaggcaaaaaataaaaaataatggggaaagaatattgcaaaagactacttgtgtcagggagttgagcaattgagttttgttgtaagtctcaatgtttaaactgtcacaaacacagagattgattcacccatcccttgtcttcctgcagcaatattggccaatgctctctctgtgaaacttcaaacttcaaatgaggcccaccttacatgggtcaccatgtgcatggaaagaatgtatttacactcaggtacattctcgtgggaaactggaaaccagccggcggcatcttggtgtgactgcatgcacaatgcatgcgtgtccttaaagcatttaatgttaatgtttgtatgtgtgaatgcaaaggaattttaatgatatcatggccacatcgaggtcactaaccttggaagtaacatgatcacaagaattttgtatgtgctgagtgactattacagtaacgattgcagtgtataattgaagtagtccggcataatttcaagggcccagactccgtggaaagagtttcctgactgagtccacgtccattcaccaaggaaggcaggcagtggccttgcagaaatccctcacaatgatgttgtgcatcccatctaccttggttttcagggctggccataataatgccaggtctcattctgctaccgtgacctcacaggcatgatcttctgcagctacaacactatccatgcatcctgtgggtatagtgagcaccaccctggtatgtttttttttttttccctttgtgatactctcttaacattattagaaggaattcttcataggaatagggaacaaacaccacagtggcacagtaatgggaaggagcccaggctaggagttaggagacagtgggggcttctctgacaccaccagggctctcatctgtaaaatgatatctgtcttaaaactgaatgagataatgggtacaaaacactaactttgaaaaataagaatattatattattaaaatataagatgtggtcactcataactgtgtccagccttgcaggctattcaactcccatatgccttcaacagctacagttgagggattcgggggcttggctgtcttatagatttgaatctaaggaatttgtgttgtaaggatcagtgcttcattacctgtgatgattgctgacctcctgagttaaaatgtctttagcataaaacaagagcagttctccaattccattcaggaactactcggcccaaatgtggagcttcagctcaaactcaccttggccatctggtcttcggtgctgcccctggagcccatgtagaccatggccatggtggacgagatgctccatggggagaggaagaggttctgggtggggcttgcttttgccagatgcttgaataaattgagggcaaagagtgtgtttgccacacaaagatcctccattgtttcaatctagaagcaaagagaggaagaaaaaaacagctctgaaacataaggtaacattttgggtgaggtcagcaacagtaggacaggctgcattctgtgtagggacagattccctgtctgttcttcctcatggaacaacatgaggcaggtcagggacagcttcatggacataccacctgtgcagccgtaaaaagccccttgtttagccaaatgccctcctatcgccatcttgaaattcttgataattttaaacaaaaggcccacattttcattgtgcaccagacgctgtaaattacatagccagtcctgagatacatgaagtgttttgtatgatgagcagcgacactttgtggcattccatagaataacaatgacaatatatagggacaggagtaggaattgaagccagataggcagaccctaggatcatgctctcaacttctatgctgcccccacaagcacaacgcacacatccacaccacacacactgccacacaggaagatatacacatattgaaatatatgccacctgcatacataccttgttgcatctggtaagacggtcaatcttctttctgctttcctgcttctaaagtgactttgactcattgtttgaaggtttggagtttcacccagcccctatcccagaaccccttccctatatgcaccacacataccacagccttactaaaaaagacttcctatactggggtgttcattactgggaggactagaagacccccttcttctgccaccccaccaggtagaaagtcaatgccaggcaagattgcagggataatccttaatcccaggcctatgaaactcatgtatacaccaaggtatgaaccatctgagaccttccctgacctcaggctctgcaggcaactgaatgcatgctcacacccaaggtgtgtgtgttttttggtcctgaccaatgatcgtctttccagctgtatgttttgctttcatcatagcttgcaacatacccgataattatcaaaatatgtaaatataccaaacaatgctgatactgatcatccctcaggaaaccttcttatgacagtgccttccccgaactggggaggggctggaagtacccaggaggaagcatgtcctctggctctggtcttggctgtgtacacctgtggtctcacacagcattgctctccaacaaggaccattggtcgcttctttcttgcgtgaacccttgattcatgaactctttttttttaagaaagtgattggaatttatttgtattaaaatgtctcatttggaatacaaccagactattttatcaagacaaaaatagtaaattaaataaaacgtatccctaaaactctctcacctcctctcctcgtttaatctttgcagaatctgtatgaggtagaggtgattctccctattttatagattatatcctgatgctcagaaacattaagtaacttgtataaggtcacacagctggtaggtagtggagcagggattcaagcccaggtctgtctaaggaagcccactctttccaatgttccacatcgcttcactcggtggtgcatagcttcactatgaagtgtaagagcttaagcaagttgtagtgcaagaaatgctagaaagaggaagtcaaaagaaaaaagtagtaaacctgtaattctactagaaggcttattaggaagtaaaaacaaaaagtcactttttttttctcttgcttcatcatagatactagattacattggatggctcaaaaatttgttcctcttcctcttaaaattgtcttcataattaaatagatttattgtacagatttttaaaattaattatctcaatatcttttggaaacaaactgagtattaataacacaaataaaatatttctcgatccccatgtgagaaatgtaaataagagatcagagccacaaacataaatttagacttctcccatacctaaatacgtgattctttgtaacaattcataccggattctttgtaacaatccacatagtaactttgatagtaaaaatatttaactctaaagacaaactaacagaaagttctgttaatactaagttagaatttaaggtaacttgataaagaaaaaaattaataagaacagaagcaaattttcctggatgcatttacttctttcaaaaaagatagtttcaattatatttttaaataaggtgtaattaattacatttaatgtaaaaataatatttgatgtctgtatggcagtcaccaaattccttcagctcccttttcaatttgcataattacctgtccagtaaggcttagtaatttctgtaatatgaatgaaaatatgaaaatagagattgcacagctggtccatttcagaagcctagactggatcacagacttctgattccaagtctaatgctttcctacaaacttttcaaataaggtctgagagtttcataattttagaaatctatgaaggcacccatatgcagtgtttcctgactctcagataaggccatactttatgtttgaatgaaaatctttcaaaacaaggcaaaattgaagtcatggggtattgtgaaataccacagcctcctggaacaggtatacctgttgtgaattttttaacattatagtaatttatatgatctcattaacttccaaatagtatgctcttaattaaggtttaatagtattactgggatgaattaatgggagtaatatgcagggttgggcttcctggtggtgtgtgtgttggttcctgcaacacaagttgacaaatgcaccactgaaacttggcacagggaaggaagaatttgggaggagtcaccaggcacacggccattgtctctcaccctgttggccctggatgttagattggagtttgctgtagcatttaaaacaaattttgtttacaattagacagtggaaatattttgaaattgaccacaaaaattaatgagaactaagagaaaacaacagtttcaagggaatatctcatcaaatactgctacatctcccccaacagaattaaaagcaatttctcctagttgatggctttcataatgaataagtatctttttatgggatattaagttatttactgaaccatacttcagtcaaccctgcaactactttggctgattattctctttcactaaattgacccattattgaactaaactcaataaacatattgttgtactagattgacccagcccaaattgctacttaatttttgcagttcctgctttttcatttaaggtgcaaatgaagtcttcttttcctattatttatatacaatgtagagattacattcaattgcttaaatgaaaatattttaatgtatctagttgtttccatcaaatttagtgtcaaaacagtagctagtagagaacatatataatctaatctgttcaataaaattggcatcacaatctgaatgtacattttgttttggttaatgctacaaaggtatttgttggcttctgagattcaaaattaaaccttataaatttaattcaaatcttgaaataaaatattttcaattcaacaactaaacaagaaaacaccacttaaattttactcgccctctacaaacaccccacatccaaattttcaatctattaataccagcatgagggaagagaaaacatgaaaccctatttcccatagacatggcatggaaatcattgaaatacctggttgttctctggttattctctgagttgctgtctgacgggcaatgctcctctgagagttgttacagttcagacatggtaatgactggttttatacagctttgcccctcccacatggcatttttttttctccctctgtcttttgatctgtgtcctttgagtgattcaacattttactcaggaagacatcattagaatagaaatacttgtttgtaaaggcatggtttaagaaattttgggggaggatgaggtcactctgaaacttaagaatttgtcaatatctacacatgcctgtgaaagttagctaaaatctgtcagccccagtttcaagatttcccccactatacttgtgctcaaggatagtatcaaattctacaatacttcttctagctttggacaaccatggcctgtgggcttcttccaatatataaatataatgagatttactctctcttttgagcctagggagacccaagcgatgcttagggcatgggagggaagaaaaaatccattttctgtcttagaaattctctattttaatctgtcttacattgtctcaagctgtaattttcgaaataactcggattctaccctaatatcctgacacaagaagaatttttcatcttctcttgattataaaatagatcttatggccgggtgtggtggctcatgcatgtaatcccagcactttgggaggccgaggcgggaggatcacttgaggtcaggagtttgagaccagcctggccagcatggtgaaaccctgtcactactaaaaatacaaaaattagctgcacgtggtggcacacatctccagttccagctacttgagaggctgaggcagaagaatcacttgaacctgggaggtggaggttgcattgagctgagactgtgccactgcactccagcctgggtgacagagtgagactccatctcaaaaacaaaaaataaaataaaaagaaaacagatcttatcctttattaggagccattgcccttttacacgtgttaagtgcccctttgtccttagtgctcttctcccgtgagtgctgaggagtctggtggtgagctaagtcccttctttcttttcagcctctgtccaagaagacccctctggtaatgtctatgtgaccaaccatctgtttaactgttttttgtttttgtttttgtttttttgagatcgagtttcactcttgttgcccaggctggggtgcaatggcgtgatctctgctcactgcaactcccgcctcttgggttcaagtgatcctcctgcctcagcctcctgaatagctgggattacaggtgcccaccactacgactggctaatttttggtatttttagtagagacggggtttcaccatgttggccaggctggtctcaaactcctgacctcaggcaatccgcccacctcggcctcccaaagtgctgggattacaggtgtgagccaccgggcctggcctgtttaactgttttttaaccacacattgacagctcaacaagttgggacagatatcaatgtacctagaacttccaccaccctttccttcactcacttttcaggtgctactctttctcaccgtattattttcattccagttattctcaagaggaatgtcatgcttctttctccccactgactcacctgtgaggtttgattcacaccccataacttccatggagtccattctgactcttacaaccctcagtgaacttctacgtagaactgcaactttcagagttcaggatgtggtataggaatcttatatattctgacagtatcatctgagttaggatctatccacaaatatatacttggtttcccttgagcagcaagaacagtggtgagcatcaagcaaattcttaccaaatatttttaatgggtggagtaacatgctaaaactctctagagaggccctatactgtggtgaacaaggatatgaatactgagagactcagaaaagtctcagactcagaatcttctttttgccatttactagttgtataatcttgcacgtatttctcaactactctaacttctaattttctaataattctatacagctggtactgttgattgcctaccccaatcaatgcctttctgctacccttcttcctaattttcttcgggtattattcagagagcccttgatctcaggaaaggaaagcctagctgccagtcttgtagggggtgtgtgtgtgttgggcagggtgggggtgggttggaaatgggtggacatataaacccaattctggacaaagcgttttgggagaaatccactggggaatgtttggcaaaaggttttctttccttaacagaagaaagcatgaagaaagaacctccatatctataccatcccttcctacccaactttgagcatggttgtgcgaggatgtgatgccagaagatgccacagtcacagtcatatttcaaccatataggaagactgagaaatttgcagcgatcccaaacaagagctctgacattggccagtgctagaaaccacctacctctagtttttgttcttgctgttgctgagatattataataaacaagtctgtattgtttaagcagcattcgacgctatgggttctctgtcatttgcagccaaaagcattctaaataatacaggctgctgtgaataatcaacgagatgatgcctgccaagtccttagcagattctcgttggtagtgagtgccgcataatattagctgatatataatagggtgactcttagtgtccggtttgggagctgcctttctgcctagattagagcaatttatgagctctagtataagaagactagactttcacacctcaaacaactagagagacttgtaaaagataatatgtaacttaaacccaaattgagtggtgctaatagtaagtatcatagaaagaagggaaacgattgataatgtgtgttagggtcttgagcaaagagctgagataaatgaaaaatagacaatagagagaggaaggcactaatattatagaagtgggaagcaaagatcatcgaatagcttcctgaggtctgtctggatccgagttggtgttatagaggaggaaaggagaaaaggaacagatcttatagaggaggaaaggagaaaaggaacagatcttatagaggagcctttgatctcaggctgagttgggatctaagctaaaggcagtctactgtaaactctggagaagggaagtgacttgtaaaaagtggtgttttatgaagaaaaatctgaaaattcagaagagaaagaatctaaagggtgagaaatgtattaggagactatagcagtcacccagccagtaggtcaactagaaaaaaagcacagtcactaaagagtgttccttaccaatagaaaatacatcagattaagctttctcaaataacctgaaataatacaggcaacaattgcagagcaggtcactcctacggaatatgagattaatgaaacagaaagtgtcttattttctaggaaaatgtatacaagataatcataagggggaaatgaaaggaaataaaattatatggacagtatgatattaattatataaatacaatacatgcagaagaaatattacttaacataatatttcttcaaaacataaacaggatttatgtctaagtggtaactttatagatttaccattgtctttctttgtaccttaaaaaagtcccacattttccataataggcatgcattacttttaaaatcagaaataatttaccaaagtttctgtattgaggtgttttttctctcctgactatcactacaatgaatcatatataaaggagaaataatttccaaaagaagacaataactttataagtaataaagttctaatatctaatctgagacttgcatacactgtgctttttctttgaaacatctaaccaactgtgattgcataacctgtgtagtttactcttcagtgcctatcttccctgctggatggtaacaaccatgaactccaagactataatggttttccccagtggctaggacaggcatttggctcatattaggtgttcacttagtgtttgctgaatgacttactcatgtttggcacattgtaatgcatttctatcctcttcactttgaagagcaaacagtgatacttccataattacctattttacatgatttgtggatatatggggaatgtacaaattaggaaaatgcatcatttctgtatcagcagtaatatcaccactgaaattatctcaaacatgatatgaatgtaggtcaaaagaaagtcctattttaatataaaattctatataataaccttatttttaatgacttccagttagacatattgaaactatgttaatttatagcaaagatcattagtattaattagccttagtagttagatagcatgatttattccagaaatttaagtagttgttgctgtgagccgaaccaaatggaggtgaaggcagtcacctccatggtgtgaatttgggacatcttggctaaaacattctccaatatacactttttgaaatctctttatcagagaataaattagcaacaacactttgtttgttaacggctttgggagaaatattacatgtatctaaattcctgtgaagcgggttttacagagaaaggggtggtccaggaaggagtttcggggtgtgtgacgaggataggagaatgagaaggctttgaataagcataggcttaggccaccgggaggcaaggtcccgagagacagggcaaagaaaacaaacctcacctattttaagaagtggccctgggccagctatgagtgtgagaaagtctgcacatgaagtcagctttgttagggagtgtaacacctctgtcgaagtacttatcttgttaccaagtgacaaccgcaacacagatgccaagttgataggctatctgaacaaaaatccagtgttctgtcattcagctatttgagaaagctgataaacttcttaagacctgtcatgacaaaagcatgcaagattgcatgtccagagcagcctcagaacactgtgagtcatgaattcactccttgtacacactggtaaaactccgggcttacaatggtgtgtttccttggagggcctaatatataatattagactcatataaccttgattccatgcatcactcacctctccattatccttgtggattaattatgattaaatgaattattcatattacttaacaagtcttaatttagtctctctcttatctagcatgttcctagtgcatctcagccagtgttctaggcctaggggaagtagcctattcagtgttaattgccatagcacgtatgtactcagatgacaaacaaataactaaataactaaataagatacattctaaattcagatgtcaattatttttgttttatcttcttatgactttttgtatcttttttttattaagggtggctaaaagagcagaaacagattgacactttctactaaaatacatatatgcatgccctgcaggcagatttcatttgatcctatataaaataatgtggggaatcccttgatttctaggaaggaaatggcaaggagaaactaaaggaactttgtggtagtcatgcattttatcttagggttggaccagataatttgcgttgctttctaatcatgacacccttatttagacttgtagaaaaatgaggaggaggcagaaaaaattattgctcagttcttcccctgttgattagtcataatacactgagtgtatgggcaggaagatgagaatgtgaatcggatgtgagtggtgggtgggggaaaaagaaagagacaacaaagactcccgcaactctatctccagccatgacccctcccctcattatggctgcacccatgtccatggtccgaagctggacacatcatgtttccatcattttcccagacctgtttgtcctcattcacttcccatttgcctgttatttattcaagctaatatcgaagcaacatccttgcatcttttgtccttatcaatttccacatctacaatttaacaatcattttagcttcaacatattttttgagtcaatgtgctcctctttttttctaaaattatcgccctggctccggtcttcatcatcttagccctgggttctgtgtttctggtgtcttgtcccttaatccataaatttaatctgatccagcaatgactcttcttaaaatctttcaatgagtctccattaaatacaggatatatcttagctaggttcatatgtgtccaaggccatcagttatctggcacctctctaatcacgataaccactctagatgaagtttttatcataatatctggcacataggtacataaaaattgttagcattaaggattactatttctttacctttattaatatacttagaacattgtgtccaattcatgcttttactgtttgtttcctcaattctcttgagagcagaaaatgtacattttattttttatatacacagcacttagtagactatgtgttcacttggggatgcccgacttaatattttttgaactcaactgaaaacaaacttttgtacttcaattttgatcttccccagcactactgagacagcctcaaagtatggccttcctgctttccccgctttgctatgaggatagaaaaccatcttccaggacagggagcagttaaggctgagtctcatgaactggattttgggtaaatgttaggatcctgggactaggagcttaggggactttaggggcaggtgctggggtggatccataggcaacgaaacagaaactttgaacttgactgattgcaataggcacagagtgcatcaggccagcagcaagagaactctgtccccactcctggattagggtaaggcctcaccagagataggattacaaaagttctaaactgtgagtacgtattaagtactaaggaagaagacaaagagaaagagaagatggtaagggttaaaagcaacaaaaggagaagtcacaaggggggaaggctactccacttatcctaatgttctaagttttatattagatacttggctataaacagaagaaaataaaccttttaatgacaaaaaaattcccaactttggaaagtgctgctaaacactgtgctctagctcatagattgcatatgatttgcaagaacattggcttcagagtgagagataatttaaatgatttatttgacatgtaagtaactaggctaatgaaatcaaataaggataaggaatatactggatttccttcaggtcaggacttgtgatggcctatttttttttttcctgacatttgcttctagatactgaatctaacccttcaaagcttttgctaagatgaagcccgagtcaaaggaattagtacctccaaaagcatgttatttctcagtgatgttttactcttattccccttccaacactatttcaatcacatttctggataatttcaatatccaaacccgtatgcttgtttcttttagtatgaaaacatcgctcactattctatgggcaaagctcagaagagtatgataatttaacctttctatagcactgccttcttagtgtccaatgtctctttgactcagaactgactacatattatattagtctcatgcctcaccaagctctgctaagaaacccaaacacgtggagagataggtaataaatgcatcccatttactcaagaaaggtgatagactttccccagcgctcaagtatgcatatctttgtgatcttctcctagagttataaatgtttgaacactcttaactccatgacaaattcctgttttcctggacttgagcacataaaacccatttgaaacattttttggaagacttcagcatccataaagaacctttggtcatcacatttcctaatgaagagtcatgaccccttgggccttatctctgactcatactgaaatcacattgcgtgatttttgatatggcatcataatgttgaagtaagatcctgtttcttcttctcaatgtggaaagataagcacaaatcctgcaagcccaaaatttcttatatagttgtttaaaatataatcatgcttatgagttccagtagctctgattaaaataatgaagtaggagagatttgaaaaaagtcatacaccatatatattttatatatatatataaaaagtcatacaccatatatattttatatatatatataaaactaaagcattgttattataaatgaaataatgcaggtgaaatgttaggcagaatgtgtaatcagaataagcccttgatattattattattatagaggtattattgataattacctacacgtgagtgttaaactgaaatctgataatagccatgtaatcttaggtaggtcgcttaacttcttcagacttccccttctttacattgtaatgcccccattataatgtctttcaatgtacattatcttatttaatcatttcaacaattgtttgaatgagataaatgttgtacagctgaagaagcagacatgtagagtggtcaagggagttgcctcattattaatgaattgtgacagagtatattcgacccagatgttttaggccaatgctctttccactgataataccttgcttgctcattccaattttactatgtgtgattccatttctgtgattgcttaaggagctgttagaacctcaaagacagagataatcgctcttcctgattttgattttgatcttgatttccccagggcctagcgttgtcattagaaaatggtaagtcctcaagacatttgccaaattgaatcttctcttagtcacgctgcctctgatcagacattatctgacatcccacccctacttgtgcctgggttttgcctgagattgggtgctgccagaaagtggagttaagtctttgattggtatctcagtaaatctcatatacaggaaggaggaactagaaagaggataagattataaatgttaaagaagtagtagtcaatcattttgagtgagacagtggatatttggtaatattttatgggtggtgcagtgatgttttgcacgtagacaaaattattaaatgatctcattttatcatggtcccagagtaaccttgtctgaggtttgcaatttgtctgaggatggtattttgtttatgtggtttatgtcttctaggtaagtaccatggtctaactgtgtcagtccagcttacaaatatcagcagatgctgctctttttttttttttctctcaactgacaaacagcattttgtttctggagcaacgaacttcacatgcattcaagaattgcgtaatgtgctcaaaagattacaaaagatgatatctcatcttcttgggttcaagcagacttgtttaattaatttctattaaggaaagggtcaactccaagtattactatatttggttggttggttggttggttggttggttagacgggaggaagatgatcatatttaatacatgagttttgttctacactgttattgttgcaatttgtctttaaattttaattaaaaccagacatgcatattatttttcttctcatttctcactcctttaaaaagacaaattttaaaactacttcagctaatttttttttcttttttggtatttaactctatatctctaaagaacatgattatattgctacttcttaaagagctctaggcattgactatttctcatacacatgtgaacgtttcccatcctgtcatatttcaaatatacctgtagtaatgccaaacttcgatcaatattttcagtttacattatcatgattatgtgcatggaattcactgctgggccatattctataattttactttctgcacattttgttttcctagcattatctcagatttttaaaaaatttgtttactgttatatatacttatcaccaacttgaccacaaagcctctcctagctggacaagcattattttaatgcattcaaacacttgaaatatctaatcaatttcattttcttaaaataatcacactcagagcctctgacgggctccagactgaagggggttgctctttaggcccctgaagatctgactgctaaagaaaacgcagaatcctgaggtggatccctttacctgtctcttgggtcggcttctcttttccctacatctttttatcatcctcttcatggttccctgactcatttttaagcagcacatgctccaggagctacttgagaaaaaaaaaaaaaggcatggggagaaagctttctgagatcataaatgtctgaaaatgcttcatctctctctttcaccaaattggtaatttggtgatgtatacaatcctagatttaaaaatattattgctccaaatttgaagacctttaccatcatactctagcctctagtcttgctgttagaagtccaatgtcatcttaatttctgatctttgatctgtgacttacttttggtctctgaaagcttacaaaccctctgtctccaacgtcctgaaatttcacagtgatgtgccttggggtgggcttacatttatccactttactggcacttagtaagaccttttagcctggaagcttgtgtcatttagtctcagggaactttcttgaattatttccttttgtctttttaatttttttatgtttctaatatactatttaatgcatagaaggtactatttctattaacttccatttactatggatttctcccaaagaaagaaatcagcttttccatccttacctgaagtaaacactcttctgaatttatattcattattctctagttttatttttatatctttatccatgaaagtatgcccagatagtatattgtttagtattgtttgtgtgtaaactttataaaaattgacattaccttataaatattctagagagggtgccagccaacttgtttggtaaaagggtcagatagtaaatatctcagtctttgttgccaccacttatgcctgccttgtgataggcaagcagacatgaacaagttggtatagctgtgttctaactcaatttcacctacaaaatacttgtggtgggccatatgctataggatacggactcttctagagaaactctgaacatgcgcatgggaaatgcaagagtttctctagtgtatatagaaaagaatgccaaattatttactaaaatgttacaagtcctctagagaattc

SEQ ID NO: 46 - DNA, 166043 bp, Homo sapiens
cgcggaattcaactggcaaaacagtatttaaacaaaccataaactcacgtaaggcattgcaaaaatgatttgatccacattaaattccaacataattttcaaggatacatctactaccaaaaacagaaagaaaaaaaggtgtggactggactgctacatgggacaagactacctaaaaacatctgacttaaaccatcattttgacagaagccaaagttcattatgacttacctctttgatgtgatgataggcatgtttgtcttcatatctggaacaaagaagttctattagtttcaggcaaatttcccataaggggaacaaacactaaaaatctaggaaagactgagaattttaagattcacaaaatcacacacctagaaagtttactgtccagtcagtaatggcaaaaatatgctttctatgccgtccttccctgaacccatacccttggcaggtgctgcccatcaatcacatcggtcttgctgggcttagaggggacctcagaattcttctcaactcagggctccagctaagcagcaacagcacaggaggaaacctctctgccatggctgaatgctcattccaacttccaaatgagaatgctgaggccctagaggtatgcacttcatctccattcttccctcttcactgaaagcgccttccatgtgtatatcaaaagtgctggaaaagtgaacttgattgcagtgttggttttggatgtggatttgggagttcagggatccagctctagctccctgtgcagaatctcaaactggcttgacctcaagttattttgaagaccagcctgatgagggcgcagttctgacaggcgggctcctgctgtttctgaatccctaggttttggttgtagttaacttgcctgtaccccaggcataagcagggcatcaggtgggaggagtctttccaaccgaaatgtttatcaggtcacccagtggtctgggttttcgtcctggtcttttcctaactctgcctttgggctaattacttctcttttcccaaactcagcctcgtctgcatgcattaaatgcttggaagagatgatgttcagctttaaccccacaggaaagtgagcacacccagccaagattgcacacctagtgactactatggttgctgcttaaaaccaatacctttcgggatggtttactaagcagcattattgtgacaagaagtaactgatgcaaagtctatccgattaggttgaacaatcaaatcactataaagttactcaaatggccaggctcactggctcattcctgtaatcccagcacttttcagaagctgagacgggtggattgtctgagctcaggagttcaagaccagcctgggtaacatggtgaaaccctgtctctacaaaaaacacaaaaattagctagctgcgatggcatgtgcctgtagttccagctactcgggaggctgaggtaggaggacggcataagcccaggaggtggaggttgcagtgagctgagattgcaccactgcactccaggccctatctccaaaaaaaccaaaagttactcaaaataatttctcactctgtggttatacaaccaacttgatataagcttcagttacttcatttctatgtttaaaaaaatctcttgtaaaaatttaacttttttttttttttttttttttggagacggagttgcattatgtcacccaggctgaaatgcagtggcgcgattttggctcactgcaacctccgcctccagggttcaagcgattctcctgcctcagcctcccaagtagctgggattacaagtgcctgccaccatgcccagctcatttttgtatttttggtagagacaggatttcgccatgttggccaggctggtcttgaactcctgacctcaggtgatctgcctgcctcagcctcccaaagtgctgggattacaggtgtgagccaccatgcccagccaaactttttttataattatgtaatacatttatatggttacaaagtcaaatctataaagtctcacctctctctgcatcctgtttcatcccttcctactggaatttttaaaaaactatgctttatccttccatttaaaaaaaattggtcaggcgtagtggctcatgcctgtaatcccagcactttgggaggccaaggcaggcagatcacttgaggtcaggagtttgagaccagcctgctcaacatggcgaaactctgtctctactaaaaatacaaaaattagccgggcatggtgggatacacctgtaatcccagctactcacccaggaggctgaggcaggagaatcgcttgaacccaggaagtggaggatgcagtgagctgagatcggagattgcacaactgtactccagcctggatgacagagtgagtgagactcttgtctcaaaaaatataataaaatatctattttatatttccatctttttagataaaccacagcacagcatgtactttcctttatactgtgctgtcttcgcttaccagcatatcctagcgatctcccattcctgtctcagctccacggtccttcattatatggattaattatataaatatggattattccacaggtcctctcctgatgaacatgtaagttgttcccagtctttggatattacagtgttgcatgaatagccctgtgctatttcttttcatatttttgtcagcgtattgttaagataaattcctagaagtgagattgctggatcaaaagtaaacgcatatactgggacaactggatatccacaggcaaaacaatgaagctggacccttactttacacagtatacgaaaattaacacaaaatggaccaaagacctaaacttaagagttcaaactataaacctcttaaaagaaaacaccagggaaatctgcatgatttggacttggcaacggtttcttaaatagataccaaaagcacaggcaatagtagaaaaaatagataaattggacttcattaaaatgaaaaacttttaccatttaatactcattaggatgactattttattttatttatttatttagaaatggagtcttgctctgttatttatttatttatttagaaacggagtcttgctctgtcgcccaggctggagtgcagtggtgcaatctcggctcactgcaacctctgcctctcgggttcaagtgattctcctgcctcagcctcctgagtagctgggattacaggtgcacagcaccatgcccggctaatttttgtatttttagtagagatggggtttcaccatcttggtcaggctagtctcgaactcctgacctcatgatctgcccgcctcggcctcccaaagtgctgggattacaggcgtgagctaccgcgcctggccgactattatttttttaaacaagtgttggcaaggatgtagagaaattggaacctttggtgcattgctggtgggaatgtacaatgatgcggtcaatgtggaaaatagtttagctagttcttaaaatgttaaacagacaattatcatatgacccattaattctactcctgggtatatatccaaaacaactaaaaatagactcagatacgtgtatgcaaatattcacaacagtattattcagaaaagccaaaatacagaaacaatctaagtgtccatcagcagatgagctaaaggcactatgtccaaacaatggaatattattccactataaaacggaatgaagttctgatagacactatggcagggacaaacctcgaaaatatgctaagtgaaagcaacagacacaaaagggcaaatattgtatgattgttatttatatatgaaatatctataataggtaaattcatagacagaaaacatataaaggttaccagggactgaggaaagagaggaatgggggaaaagaaaacaaagtaaatgcataggtaattttgctagacattgccaaattcacctccatgagggtggtaccacaagcaccccaccagcaatgcaagagaaggtctgtttctgaagtcctcaccaatgcagtatattgtcagacttttggatttctgcctgattgttgacatgttatctcagtgcagttttaatctgtatattttcttacaataaaacctttaaaagatcctttctaattatgttttaacatgctggtattggttcttaagtaattaccatgagaattccttagataaatattctaaaacatttataaattaaagagaatcagcaagggagaaccacacacatacatgtcatggctattacaaattctaattctggaaacaaaattttaaaaattttgcatagtgccacaggtgagcaggtacttaactaccagtacctgccataggcatagtactctgctaagcaaacacttaacaacagaaaagcccaattaacacttgataattctagaaattaaacacactgtcacccaatcataacccttttgctttgattagaattattctagctaactttggcagtaaaactgccagtgtacatgttacttctctagaattttactatatagcctgagatataagatcaaaaacaaaggaaaatgattaatttgtcaaaagaactgaatgatacaacaactttacctttccatttagcaaccagtttaggatctgaaattgtgaagcttggacggcttcttgaaagaataccttttccaaaataacccttccaggaagagagaaaatgaagttagttcatgcttagttaccagttttttagctgaggtagaatatacagtaatccctcagtatccacagggggctggttccaggacctctggtggataccaaaatcggcagatggtcgagtccctgatataaaatggtgcagtatttatatatagtctacgtaggccctcccatatactttaagtcatctctaggctacttataatacctaatgcaatgcaaatgctatgtaaatagttgttatattgtttaatataagaaaataaagtccccgtttggtacacatgcaatttttctcccaaaatatcttcaatccaaggttgggtgaatccacggaagtggaacccatgatatggagggccgactgtacccatctgagttaacaagaggttcgccccacttttcatgtctttacattttccctctgattatctaatgatgactaaggatgttcttagcgtaacacctttctaatcgcttcaagagtactagtaagtttttagcacacctcatttatcccataactaatgctttcagtctaggtctgataagccgagggcaggcagaggcagagtttcttctctacatatggttcgggaacacagtgtgcctgaaggcaggagccatgctgcccactaggtccaaaaaaacctcttggattcttttgtactccagaattgaagtattcctctcattcctgctgattccaaaaacaacatgtatttttccccttttcattacaaaatatttaaacacacagaaaattgaaagaataaaacaaacacccctttctccatttagattaacaatcagaataaagaggccaggtatggtggctcacacctgtaatcccggcactttgggaggccgaggtgggcagatcacttgaggtcaggggttcaagaccagcctggccaacatggtgaaaccctgtctctaccaaaaaatacaaaaattagccaggcatggtggcatgcgcctgtagtcccaactactcgggaggctgaggtggtagaatcacttgaacctgggaggtagaggttgcagtgagctgagatcatgccactgcaccctagtctgggtgacagggtaagactctgtcacaaaaaacaaacaaaaaaaacacccagcaacaacaaaaaccaagaataaataatgcatacagcactttataaagcctcttgcttaatgttatatactgtaaatgaaggcctccctggtgagctgcccttggcctactgagactcctgcctcaccatggccagtgccacccactcttctatcaagtgtctagagaaggcacatttatggagacaagacgccattccgtggctgccttgggccgggagtgggagcagggattaagtgtgatgggcacaagggaactctgtggtgatgggaatgttctaaaactggactgtggtgagagttgtgcaactctataaatttatgacaatcactgaattgtatacttacaatgggaggactttatagttgtaaattataactcaataaagctgttttttaaaaatgcccacagcaatgaacagattatggaaaattttttttaaagaactaccagtcttcattcaacttgatcaatgctggaaaacagtaaaaactagaacttgtcctcatctgagaagaggtccccaaccaggaggcagcagataaggagctccatgccaaagccccatctgatccgtgcctgagtagggacactatgccacgctgtggctacctctgggaacgggatgggagtgagtggggaattttcacttttttacccattacatttctgtaaattactttttttgttcctttaacaaacatgcattgcttttacaactaaagacaaaaaaaatagtcaatccattgaacctacttcatcactgaaataaaggtttgtgggcaggggtgctccatctgtcattctattaccctaacatatggcttttgggcactaattcaaattgtacttttcctacaactggaccaaaccgcaaggaaagaatacacattgttcatggttggtgtgggggtatggctgggatggggagaaggaaaggactgcttgctcagggttgtctgaaagtaatcttaccaaggctgcctgcacttactttcccatagagctgctcaatgtcctccgcattcctcacaatcacattgttgttaatcatttcagcacggaatatcttgaattctttcagaggaccatggtcctgaccaaaagggattggcaatggagactcgtaagtctcatacactcttcttttcctctttggggcatggaaaactgcttctgccatttttcagaggaggtattctttaaagagtagacaacaaacagaaagaaacagacaatcaataactaccttgatccaaaatgtgagtacatctgtacctaggctcagaaaacttagtggtctgtgggaagaaatagagtatttataaagcaataaactaaaagcagtaagaacagtttgtgtgagcaatgtaaatcatattgacctagaatactgcaattaatccccacaataaaccccaggaaatgagtggtaatctttctactccagctgacaacgctgagacctagtgacatgcccaaagctgcaatgttaggtctcctgagagcaagcacaacaggatttctgtctaccaggagtgcttccatttcactcacccaacagacatttactaccaggaattcctaataatcataggtgctggggagacaaagacaaaactgagaccctgtcctcaacaaattaaatcttgcaggcacttcattttccaagaggatcttacaatacacactaaacattgggtcaatcagctcccaatttttaaagtacattaataaataataatgacagcagcagttatttaagggtcgattatatactaccaaatgctactggcttcaagcagggactctaaagccagactatcagcatcagaatcaactttaccacttcctagcagtgtgattttgggcaaaagtcactgactctctctgtgatttagtttcctcacctgcaaaatcaagataagaacgactctatcttacagttaagatccataaagtgcttagaacagtacctggcacatagcgtgtaccattcatgtatcagctataattagtattacagggtgagcagtagcaacaccattttacaaataggaaacagattcaggttagagagatttgtagacgaccccgagtgtggtggcatcgggtgacccaggtctgttgaactcccaagcccatgccctctctctagattctgctgaaagcacaggcagggtctatctacttttgtctgatgactctttctcaaaatcagacggtgaagggttattgagcagtaacggaattacccactgtgcacccagcaccatgagggagaacagaaagccaaagccagtacgtgtccctctggggccatacattggatccaaggagacaaaacaagtatataacatagctggaagcacagaaagcaggttggagctaacggaactggctgttatccactaatgtctaaaggagggaagtaaatgtgaacatattgtgtgatgcagacacagagatacagtagatgcacttaacctaggaaaacgtaaccatatacatgggaaaacaatgtaaatggtgcaagacattccactcgaggagcagctgtcctggaatgagatgggaaacttgaatctgctgctcccccagtactaggtctagacttgatttcaactgagagcttacctggtgcttgaagatacagtgcggccaaatcatacacacgtttaacctacatgactccgaatcctcacaagggaaaaaataagactaattacttaggtggctcctgcactcagtacttgcatcccattggcaagggatgccatcaagcctgaaacagtcaagaaggtggccaaaactgagggaggggaaggtgagtggctttaagagtgtcatgaccattaagaaaaggcttatccaacgtgtgatgatatcagtatccaacttctcaaggaagaagctgaggaattatatgaggacacagaaaaacacagactaaagaggagttagaggaaatgatacatcaattacaaagataaccatgaaaaagaagaatcgggaagttggaaccttcctagaattgccattgttctaagcagcaacatgctagattaatttctaaataaggttccttgaaggaattacatactgagcattactttgtacattttatatttatgcatgcatcttgctgtatagtgtttataacaaaaccacgtctactgcatgctcacaggaaacctaagagattttcttaagagcatatttagactaggctttaccttgcttgctgacttatccctcagcccaagtactaaattatcacatttagtactcaattggagagacaataatttattctaaaactgaaaataaacactgctttttgggggcaggatgttggtctctagtaaggcactttttgaaagacttccaggaatggtttggacttttatgggatttttcacttttataacctctgctcagcagctgacttatatacattacattcggaattttaaaaaaatgaaaaaagatttaatggccaccttcaagaagttctaataaattctctcaacaaataagagttgtattttagtctgcctcatttgttcagcgtttttccctctcagactgctgtcacatctaaaaaaggcaagatttagctgtgacacttgatcgaaagaactctgtactccaacccaggtgtgtgggatggaagggtccctgcgacaaaacacccctcataatccaagttcttgtgttactcttgctcatgtggctgcacacccctcaggaatttggctcgcagtaggccttccagacatgcaaagccgccattattattgtgtgaccttgcacaacccactttctctaagcccagtttcatcttcaaatcgaacaggactggaggagtctggcagttcctcaaaatgtcaaacacatagttacgacatgatccagcaactccacccctaggtatagacctaagagaaatgaaaacatatgttcatggaaaaatttgtatgtgaatgttcacaacagtattattcataatagcatcaaagtggaagccatccaaatgtccatcaatagttgaccagatcaacaaaatgtggtctatccatataatcaaatacttagccatagaaaaggaatgaagttcggatacattcttcaacacctgaaagcattatgctaaaagaagtcagacacaaaagaccacgagacaattaagataaagtttccggaatagacaaatccatagagacagattaccagttgccagagacagggaaaagtgggaaatgggggggcgactgctaataagacaggaggtttattttggagggtgacgaaaatgttttaaaattagattgtagtgatggtaatggttacataactccgcgaatacgaagaccactgactcgtacatttcagaagggtgacttttacagaattatatggtatctcaataaagctattttaaaaaattcagaagtaaagacattccccaggccatgtcctgcaagaatgacttcacagataccagcgtgaagcttctagaaaagatagaaagaaaccctcagggaaggtagagctcacttccccagggggaaaaattcaagaggacaaatcagatgatctctagtttcatggaagagtcctcctgtgctgaactcgaaaggcaaagcagaggagaaaagactgcatttaccattccccatatctgcaatggatattcaagaaggttctttagtgtcgcggcagaacagcatgctgtaagaggtgggatgtgagtaaaataagaagaggaaactgtcataggtaggtaccagatgccagaggcactcactgcatgtgctgcacatgtgggtactatagtcatcccttggtatccacagaaggactggttccaggactcaccccctaccaaaatccgcagctcaagtcccttaaataaaatgtagtatttgcatgtaacttatgcccatcctcccatctactttaagtcttctctagattacttagaatacctaatacaatgtaaatactaaataattgttatatatatatatttttaaatttctttttccaaatatttttgatgcaacattggttgaatccacagattcggaacctgatagcgagagctgactgtactatcctcattccacagatatgaaagaagagcggtgcctgaggtgcacaaaaacatataggaaagactgggtcagttgtcaagaggtttgggatgcaaaggttggtttggaattggagtcactgcaggttatttagaatgatgattgaaaaatgcagattaagaaaattaaacctgggagtggtacatcacacagtggccctcaagcttacctacccttaactcctcatgcccaggcctcacctgcaatcaattacatcagaatttcctgggtggacccagctgattttaacatatagctaaccactggtaacagcaaggtctattcaaattcacttaatcccagtagcccccggaggtaaagactatttttatttccattgtacagatgtggaaagtgactcggaggggccgggcgcacccctgagaaatctttacttcttatttccccaacctgcgcaacctgactccagagctgcatattcttactttctattaaaagcagagtctgtttcttattcttccctcgagcacacaggctaacacctcttaggtgatggtaaatgtctattagaaaaacaaaaaagggagaggtggctccatttaattttccaaccttcctggactaggtgccaaacaaacctggttaaaaaacctcctacccagcaaatctcaccttctcccaaccaaaacacgcttcaagctccatctgcgcacctcctgggcttagggaggcaaggatgaaaggcacaaggtaaacaatcctgcctctggggagctttcaagttagaacctgagaataagccatataaacagatgaccagcctttgaaagttgttgtcaggattaaatgcataattttgcagaaggcgtttcgttcggggcctaccacgtggaaagcgctcaccagacgacagctgcaaataaaataaactgcgcaccccaacagcgttaggggccccgccaattcctaactccctgtcttacccctttgcttctttccttgactacccccacacccgaccgaactccaccagaggctgcggctcctctcgggcattgtcagctgcaccttgcgccccagccccaccagccctgaacaaggcgccggcgtttccaagaaccaagggctgcaggcgcacgaggaaagcgcggaggagtcagtgaccgggcgcactcggaagcctggctccccgtcccggcactgtctcggccggctgtgcgaccccagcacagtacctaggccctttcctctctcgccctggaggactttcggaagagcgagatttcctttcgctgcaaaacaccaaactcggaaagggccgcgctttcctcgcccagggcccttacctttcttggccccacgcgctcgccgttaccccggcaacgccggccgtggggcggacaccgctgccgtcaagcagtgcggccgcaaagccagccgagtgcgcagccgcagagctcccgtcgggacttggcggagtgcgcctgcgcacggccggctggcgggtgttctgtgcgccagctctgccactgcggagtatgaggcggaggctgcgtgcgcgctttgctgctctctgcaggattgtacggaagccagaacgatcctgcaagacgcattttacagatgagatgcagttacccgtcaaatgtcacatagtcacgtgggaggtgggagagacctagaatcttcggccctcggtggatgggatgtttgaggcgaccgacaggactttattaaatggccctgaggaaactgatctcatctttctcaatgtagaaagaggatcacagcagcgcacctgtgtacgctgcagcatgcggggaacttgcaaggacgttttctctggcagacacctggccagaagcctctgtgtgcccagactgcctgtgcagttaagggacaataggcggcaggtccacctgctctgcatccccattttcccccctcactggctgcgtgagcttgaatgactgacaacctttctgagcttgagtttactgaaaaatgggccatcagaattacgggagatgagcaaaactggagtgcaataggaagtgtaagtttctcctgacctggttattttaaaggagccctgtggggagtccaatatatactttcccaaatatgaatcacaggagttccaccacacagactaagcaggaggcaaaggaggatggcaaggaagtgtggcaaatactgctggagagattcatggtgctagatgtgatgatggatgttgaattttggacttctgccaatgttcttgcctccattccttcacgcatgctgttgcctctatgttccctcccctctgttagctgcagtaattcctggtcagcctttaggtctcagctcaaatatcacctcttccaggagacttcttgccttcccagacctgcttgggtgacttgcctctgtgctctgcagtagtctggcatggcatgtgttgtccctgtttttctggccctttttattttttgagacggagcctggctctgtcgcccaggctggaatgcagtggcaccatctcagctcacttacctcactgcaatctctgcctcccaggttcaggtgattctcctgcctcagcctcccgagtagctcggattacaggcgcctgccaccacgcccggctgattgttatatttttagtagaaacggggtttcaccacgttggccaggctggtctcaaactcctgacctcaagcgatcctcccgcctcggcctcccaaagtgctgggattacaggcttgagccactgcatcctgcctggccctttttgaactgcactgtgggcttgctcttggtagagtgagatcatgtcgcagcattcagtgggtcctctgctgcaaggaccttcactgctaggctagggagttcaggttttagataaaccaaaatcaaagagctttgtggtaagaatgttgcaaaagaaagggagaaaattggcaagagtcacaggatatggtaacaggatggattgggcaggggagagacagctgaagagaggctgtaatatccgaccagaacatgccaatttaagaaatactggttttagaattagagggctttaacaatgaaagggattcagaggttgtccagttaaacttccttatttaactgataagaaaacagttccagtggcactgtgagttgtcagagataaccgagcaggtctgaggtggggctgagactagagccaggtctcttaaatcccatcccagctcgtggaaggatttggggtttgctgataatgggatctcaaattcccctcccaaaaacataaaaaaagaaattaaaaaaagaaaaaaaatctgtaaattttaaaaaagaaagaaattttccccaagactttctcaagtgcattttaaaccctttgatatggttattttcaaacatacaacacaaaagtagagaaaacagtccaataaatcatcacttctggccgggcacggtggctcatgcctgtaatcccagcactttgggaggctgaggcgggtggatcacctgaggttgggagttcgagaccagcctgaccaacatggagaaaccccatctctactaaaaatacaaaattagctggacatggtggtgcatgcctataatcccagctaccctggaggctgaggcaagagaattgcttgaaccggggaggtggaggttgtggtgagtcgggattgcaccattgccctccagcctaggcaacaagagtaaaaactctgtctcaaaaataaaaaatcgcttctacaaccttcaacctttggtatctcatttcttttgcattctcgatatacacacttttatctccttgctggagtattttaaaacaatcccagacatgatataacttcatccatgatatttcagtaggtatctctaatagataaggacttaattttattacaatacatctgcatctacatatatatatatatatatacgcagacacacacacacacacacacatatatcaactgtgtagttcattctcattatttgaggtaattctgttctataaagttgccacaaacactgaattagtaaatactgaaccatgtttccaggagaaatacaagatacaaggttaggtgtctgtgagtctctggtcacagcattttcatcaactggtcaatatataacctcacttcatgtgtttctgtttaaagacaccttacatatgttgattcatcaacactgaactcgcagccaacagcactataactcctgcctaaaggaggcttatctaacacacctattctctccaataaggcacatttcttgggtggggaacaccagacagcacttcagcactccacttggggccattttaaacagttaaatcaccaacaaaaagcacaaaaatgtgaaaaacatggcacaaactagagctcaaaaaagcatacttatttatggtatgagagctgaaacaagaaggcagagtctccttgttcacctgcagctgggaatgtgcacactgtgtgactcaaattttttggtattctgtgcatgcacacatctgcagatgactgtgacagtgaagtattgattgtgatgttaccaataagttttagcaactaggtgagtttgtaaatacagaatccaagagtagggaggatggactatatcaacatatccccagtatcactagcacatctaacacaatgaacagttatcggtgaaatgtgcccagaacctccaagtaatatttgggatatacttaagaaaaaagtttatctgaaattcaagttaatctgggtgcctcacattttatctggccaccctagtgacaatttattgggcacttactatgtgccagccacttttgcatccatgatcttatttaattctcataacagggctgtgagattggtgttcttacctctcttctgcagccaaggttaccgcacatgcccatggtgtcattgctaggaagtagtgaaggccagatgaggatacggatctacggggcttatgctcttttaatctgtcatgctggatacaggagggcaatgcattaacaaaacatgacaggccgggcgcggtgacttatgcctgtaatcccagaactctgggaggccgaggtgggttgatcacctgagggtgggagttcaagaccagcctggccaacatggcaaaaccccgtctctactaaaaaaaatatataaaaattagctgggcatggtgatgcgcctgtaatcccagctattcgggaagctgagacaggagaatcactcgaacccaggaggcagaggttacagtgagcggagattgcgccactacactccagcctgggcgacagagtgatactgtctcaaaaaaaaaaaaaaaaaaaaaacaaagaaacaaaacaaacaaaaaccacacaacattcagtactgaaatataaaaaataaccaacagtaagtgtcggttggaggtcagggaagaccaggatgggtttaagagcctgggaggcttccaggaagaggtggcatatgagctgcccctggaagggaggttagccttaggaggaggagaggaggagggcaggtggctgcctagggcacagggcaggcccatgtgcaaggctggaatgggccttggttccggagccagggaggagctgggcctggccggggcaggaggttggagctgtgataaggtccgataggtagggtggggaccgattgtggaggcgcttaaattccaggcttggcttttggactttaccctgcagacaatggggagccaccaacgtttctgagcagggcagggcagccccagctgtcgccccattgtttttctgaaatagcgttgaaccctgtagtatttcagacagtccaccagatggagacatttcagcaaatttaaaccacctagtgtctgaaggacactgctttaccgaggtgaaaacaaacacagggaccctactaagctctaactttttactcagcatcctcaacagaaaatgcaagggctgtgaaaaaaaaaaatcaaatcagagacatagtccagcttcactctgctggtgagagaaagcctccgctaatttcaccatgttgaaagagagattgagcctcagcagctctttgaggtcactgatattatcccatttacagatgaggaagctgagattctgcagcgtacattaatgccattatttaccagactaacaccaggccaggctgtgggatagagttgacactgtgtgtgaagggacgggctggtcaagtccccaaggcattgccttgctgtgtgggcttttaagggccaagagtcccttgtgcaaagggttaagaattacctgagatccagaaagatctgtagcactgatgatgagagctacctggattcctaccatctgcactaatccaggtgttttttttaaggtagacccacttaattctctccagcaacctggtgagttaatgatcatcatactctttttataggtaggaaaacagattcagagaggtgagatgagttgcccaaggtcacacagggagtaaacatcagagcaggaggcaggctcggtggctcaggcctgtaatcccagaactttgggaggctgaggtgggtggatcacctgaggtcaagagttcaagaccagcctggccaaaatggtgaaaccccatctctactaaaaatataaaaattagccgtgtgtagtggtgcgtgcctgtaatcccagctacttgggaggctgaggcaggagaatcactttaacctgggaggtggaggttgcaatgagctgagatcttgctactgcactccagcctgggtgacagagtgagactctgtctcaaaaaaaaaaaaaaaaacaaacaaaacaacaaaacaaaacaaaaacatcagagggtggactagatttcatactcctactcctgccctgtttcttcccatgaacaatcaaacaaactctacttctgtgtaaatttcctagagaaacttaggcatctgtggccaaagaaataaatacaaagatttttattaaagcattatggttttttttttaaaaggagacaacttttagcccggcatgggggtgaatgcctgtggtcccagctactcaggaggctgaggcaggaggatggtttgaggccaggagttcaaggctgcagtgagccatgatcactccactgcactccagcctgggtgacagaacaagaccttgtctcgaaaaaagaaaaagaaaaaaaaagacaacgtaaatgttcatccctagagaagtggatacgtaaaacgtggtataaaatgttcacacagtggagtgctatgtagcaatgcagcagctgaaaggagtgagcaaattcttttttttttttttggggacaggatctggctctgtcacccaggctggaatgcgatggagtgatcacagcttgctgcagccttaaactcttggcctcaagccatcctcctgtctcagcctcctgggtagctggaactacatgcctgtgccaccacacctagctaattttaaaaaattttgtagagacaggatctcactatgttgcccaggctggagctcttttatagacagtatatattaacataggtagatttcaaaaacataacatttgttgataaaggcaagatgtacaccaatgtgaatcatatgataccatttatgtaaattaagacataaatcaatatcaaatgctaaatatatggataggtatgttaaaatattggaaaataatgagaaggatatacaccaaattcattagttatctgtgggacttgggtagtagataaagggacttcagctttgtctctattgtgttatttcctaaaaagaaaaaaaaattagaagcaaatatgggtggtgggattataggtgattgttaaatgattgttgtattaatttgtatattttaatatttgtgcaaaaagatgcttcaagcaaacaaataagtacaaagctaggaaacaacaaaaccaaagtaattttgctatttaagatcaacagtttgaagatggaggtagccagtactgcgggagggcctcgaggaggctggggaaggaggtcaggagcccacaagtgctgaccctgcaaagctcaggcctgggctttgttgctgtggcaatgtggcgtggtagggtcccattcgtcagcatttccaaggtaagaacccagtcccggcattccacaaatgatcccaccaccctgcaactgctgtccctgccagagagaagtgagcgccaggtgaggatcacttcaaggaggaaacagaggactgaggagcaggtgcaggggccctggtgaaaatgtggctcctcctatgggagcagggtggctggcagtggtcacaccttctagtttctcaccctttaccaccttcttttttgtcattttctctaaactcatggttacatagaccatttcttaatgtgtgttcttgacagaccacgcccactttccggcaccaggtgctccaactggaataaaagggcagtcctcactttgccagcctcccagagctgtgctgaccagcatgtgaaatcacgatcccgagtgttctttggaaactgttcctcactaccaagtgataaaagaccatcgcttctcctctttcctcccttcctttccatttgtcatggtacacaaaataatatgagtacacattgagcctagagttttaactttcatcagcctgttttcccactcttcgattcctcaccacgcctctgttagtaaatatttttattctccccattttaaagatgaggaaagtaagactcggagaagttaaataatttacccaaggtaacccagctaagagtgacaacagggggatttaaacccacgtcctccaacacaacaggcccttttgcctatgttgatgcatttgatgtacaatgtattttatgatctcatatcttatccaaaaagaaggtacagacaacctttagtgttatgtttcctctctttctctctcaaaataacatacatatcttctttgttgcaagttgtttttgtcttgcatgtgactcccctgtaggtccccacctctgagctcagaattttaatttcctgggtggctgaaaaactctggtctcctcacaagagatacggaagaagaggccgaacatggcccaaacctggctttcctgcttgcctgggtacatctgcctcagatatcaaaaggcctggattccaggcaaaccaggaataatgccccagtcatcaaatttgaaaccaaaactcagcaaagacatatatttgctgccagacagcaaatagctttttcttttctttctcatttttttcacccaaacaaaacatcctcttatgaaatatgtccaatttgcaatatttactttccctttatttaataacaggaaagggtttgctggacttttgttgatttttgcatttcttattaaaattcttaagggggttttgggggaacttaatcagcaaaaaggaggaggaaaaaaaaatctcatgtgcattccacaggacttattaatggaggaagcttgctgtttgtttaagagcatgttctgatgggagaaggcaaatcctcacgtgttccagaggcttcctctgactcttccttttctgtgcttccttcttgactgtctccagagcatttccgaatcccttgctctaaacctgcccaagaagatggagcggagtttatgccccaccgccaggctggagggaagctcgcattcactgagtgcccagtgcagttgctttaccctcgacctcagtttacctcaaaccagccctcagagggggctgttatggggacatttggcagatgaggaaactgaggcttacagcatggagtcccttgtccaatctccctccctttccttatactccatgggactaaaaagaaaggattcctagtattcagagtcctacatccaagggagtcctcacagcaactttctgagatagctacacagtctccaattttcaaggctcagagaggtaaagagacttgtaagggtcacacatctacagagtacagagcagggatctgggctatgctcggcctgactgtcacatccatgtttatttcccttccccaagggacctcgtgggggccaagagcagcatgatgtttcctataatggaatacactcccctaaaaggtcttggtcctgccttccttggttccagaactagaccgcaagtaacttcaaggactttgtctttatattttcatttgaccagaaatacttatagttatctacattactattagtatatacgtcatactatcatcatagtatgtacatttctagaatagggcctcgtacggggtaagtcttaataaatagcattgcaggatagtcaagtcccaatgttctccttctacagacaaggaaactgaggtctagagagaagaaggaatttacctgaggagccagaagactggaatgagaatccagctctcttgattccctccacgtggtgctttccccagcgtgtctgctcagtgacctgctcatccattcagttcctgtatgccatctctacactggagggttgggacacccaagtaaacccaaggcgatatttgatggcaaagctctcacagtctagcaggggaggaagctctggaaagttggactctcaagtagtgtggccaatgctaactgagggacgcccaggaggaggaggctgaggaaagacttcttggaggagtggacttttgctgggtcttggagaatggggaggagctgaccaagtcagagagggcaccccaggcagagggacctacctgagcagaggcccagaggtgtggacacacacggcatatccaggaaccatcaggcagcctgcctgggagaagcaagcctggaaaggaaagtgggatcctggctgtgaaagggcctcagatgctgtccttaggggcttaggtcttataccaagggcgacagggccacagggaagggaggaaggagggaaagtctcagccagatgtggttttagaagatggctctggaggcctgggggctgagaggctgcagggaggaagctgctgcctactccaggggagaggtgccgggccttgtgcgcctacagtcttctttctactcctcccttccttgagtgaaggcttgcctgtccttcaagctcaatctcctgctccaggagccttccctgaccatgcatgcatctaccctcccccagagcccctctgtctgattcctctcttttttttcttgggtttacaccatttagcatcttcctttgcattctcaaagtccttggtagcaacagatcttagccttttggaggtcagagactcctatgagggtctagggagaggcttgattctcactccagaaaaatgctcaagtatataaatgctccaaatatggactgcattgtggagtttggcagaccccctggagttgctttggaggagggaaggggacaattcccagacaaccagggaggcagacaccccaaaacgtgtgagttaccccttgcaaacccctgggtaggcagtcgaaggaggcaagggattaggaatgaagattgccgttgggcgcattggctcatgcctgtaatcccagcactttgggaggctgaagtgggcggatcacttgagcctaggagttcaagacctgcctgggcaacacagcaaaacctcatctctaaaaaaaatacaaaaattagctgggcgtggtggtgcaggcctgtagtcccagctacttgggagggtgaggtgggagggttgcttgagcctgcgaggtcaagcctgcagtgagccgtgatgatggtaccactgaactccagcctgggtgagaaatcaagagcctgggtgagagatcaagaccctgtctcaaaaaaatacatattaaaaaaggaatgaagattgccctctgagagttcaagtatacaacccagagggaaactaggccagagacagccctaaatggatgcagtggagtttctaaagaaaacatatacatgtccttctgaagaaagcttgggtagccagggaggcagagggaagaggaggaaaaagaggacccaggccaaggatttgggggagcctcgtggtaggtctagctcgccccgatgctgctaaacactggagtcccataactgacccctcccttctcattctgtgctcaccaagcaccattttgatttgaacttggctttctgcggagtgtgcctgcagggagctgacgtgttggctggaggacacgtgtatccggtccctttggcagttacatttctctctgtaaattagtaaattgggaacagacaattcacagaagaagcaattcaaatgactaataagcgtatgaaaaaaagttcatcctcaccagtattcaaagaaatgtaaattcaaaccaaaaccgagattgtttccaacctattaaattagaaaggatttctttttttaagttaatacagattgctgggaaaagtgtggcacaagggcacctgggggttctgctgaggggcatgcgacctgctggggtgggtgacactggggcccattgtggatgttctttcaagtcctgcaaaatcaatccaggcaatctcatctgcctgaaagcaacggatggaggagtctttcaagaatctgttcgacaaatgtttgctaagcacccatgacgtgccgtgcttacaagacaccatctgggataggggccacatagaaatccttatcccaaatgccaaatggtctcagaccacgagggaggctggaggccacttcctgggtgggctggaagaggagaagaagtggaagggaacgtgagagggagaagaatcagctacaggccatctcttccccgcagccccacacccttctcctgctacttccgaaacttgtcagacttgatcaagctgaggctcaggtgctcttgttggaaccgcaggaacttcctagagccaaggtctccaatctgggtcccagagagactgacctcattggtctcagatgggcctagccacagtatgtttaaaaagcatctcaggtatttcaaatgtgcagtctgggtagagaactactgagaaagcggaaaataagaaactcagtccaaggtggtggttaagagcacaggctttagggctacatggacctgattcaagtgccagcttggtcacttactacctgggtcccctctggcaagacacaaacacttctcctattctagccttggtttttttctctgcaagacaaacatcaaatgtctgtcccacggtgtcatggtgagggttaaatgaggcaaggtgtgtgaagggttcagcacagtgctggatgatattcatgattacgacaattctggtcagccagatactatcacacacgaagtcccagcaggaacaaggggctctaggctctgaaggtttcagaaaacgacaaagaaggaaaactcagttgaaattgccatggccgtcagcttaatcttttctgtgagttgggagcagatccccattggagcctacttgagctccaggaattcttgttctagctgactgtgcagatgaggaaatgacgaatgattctatccagagaatcattcctataggcaggggtagtgctgaacggctgcgctgatttttcagtgccaggatgtactggccccttttctgtgaagacagcagttaagaggctgggttgacgggggggccctcagacccagttctaccggattctaccactgactagctgtgtgaccttggacaagtgactttgcctctctgagcctcctcagtttatttgtctctaacatgggaattcaactggttcctgccacagctggcccccgggaggacttgtgggtaatgctggtgaattctgagagcaggatctggcttgtgttaaggcctggaggaacggcctccatatgggccccccgagccaggaacagcccttcccaccagtttcattcccttatggcacttacccccaacacatggggcctggaggtgtgactgctgatgtgtgtgtcccatggagtgctgggagctgattctccaatttccttagggcccttggtttactgtatcacatttgaccgctgctcagagggacatgtatgaaactgaacccctttcctttcacagataagaaacctgaggctcccagaaggatgatgacggcggccactgaggtcccacactcagtgggtagtagaaccatggtctcccctctcctcgccagccaccttactctagccctggtgctgggaaagaattttcgaagcaacacacaccgggaatggagggaagaggagtgacctccagctgcctccttgggcagtgaacttgaatgagtggggttgaggaggaaaaggagatcacagacaccccggggactcccgccagaagtgggcgaggctgtgcaggtggctggaggaccggggtgagcgagcagagggggaggctgggagagtaaaattcacgttattacgggcagggtgactcatctgtgccaacaggctggtgagacatagagaaaccccaggcacaggaagatgaaatgggataacgtgtttgaaggttctttgaaaacagtaaatcaacctaacagcaggggcgccaagagagctggattcaaagcctgcttctggaacgcacctaggaccttgggcagcggcttagcctcttggaacttcagttgctcatctgaaaggtgggggtgggggtggtagcagcctcagcaggagcgatgtggatacagtgggtggcacagtcctggcatatgcaatgtctatcagccacaacgatggagaggaagaaactgggccctccaagacgcccttcctcactgtgtcttcctgtccaattcttacccatccttcagcctcacctgattcccttaggcaggaaagccctctgtcttctctgcactttcatgacagcctttccatagctcttatcagacaaggcctggcattcattgctctttcaggagggatgtcatccagtggcctgggggtctgcagggcggggcctgggccttattcatctctgtgccttgactttctcccgagagtcatcagtgaacacttgttgaatggccagaagaggcagaaacagcagcaggtggtagctttctgggccttgctatcagaaaagaatatgttatttgagctaatgaagtaaagaggagaaatgaatttgtaaatgcattttttaaagctctatcaagttcttttttttttcttgagatggagtctcgctctgtcacccaggctgaagtgcagtggcatgatcttggctcacggcaacctctacctcccacgttcatgcgcttctcctgcctcagccttcctagtagctgggattacaggtgcacgccatcatgcctggctgaattttgtatttttagtagagacggggttttgccatgttggccaggctggtcttgaactcctgacctgaggtgatctgctcacctcagcctcccaaagtgtggggattacaggcgtgagccaccaagcctggcctgaccaagttcttttgatgagtactatttaattcacttttttttttaaatgaatggagtctcctgtttgcttttgtctttgggctctgctgcagattaatgaataagaatgtcccatatagcccacaggatgataaatccacctggaatgtttgtgaaagagctgggcagggaaagttggtccaattgtagaaagctgtatcaccagccatcagccaagacaaaatagatgaagagaaaaagcatccactctcaaggattagaaaaatcgagagcttgcacttgcgggcatttgtgtgacatgatcttcctaagccacgggtcgctcatctgtaaaatggggaaagcagggctacccctgcaaggacactgagaggtttgaggatgatgtgcgtagtacctggctgggagcgggtgctcaataatgccagctactcttgccatcaccactcagcgtgacgtgagcttcttttctgggctaattacgtgaagtttaacatgagcttctataataaaatgacctgtatctatttcttttttttcttttttcttttcttttctttttttttttttgagatggagtctcacactgtcgtccaggctggagtgcagtggcgccatctcggctcactgcaacctccgcctcccaggttcacgccattctcctgcctcagcctcccaagtagctgggattacaggcacccaccaccatgcccagctaatttttttgtatttttagtagagacagggtttcactatgttggccaggctggtctcaaaatcctgacctcgtgatccacccacctcagcctcccaaagtgctgggattacaggtgtgagccacggctcctggcctcctgtatctgtttctaaatgtgagcccagcccattcatgatctcttcaatggataaggatttcagatttgggattgtgattttgagtgtatctatgaaatgggagggagaggccaggcaggtggctcatgcctgtaatcctagcactttgggaggccgaggtgggtggatcacctgaggtcaggagtttgagaccagcctggccaacatggcgaaatccacaaaaattagccaggcatggtggcaggcacctgtaatcctagctacttgggaggctgagggaggagaatcgcttgatcccgggaggcggagattgcagtgagctgagatagcgccactgcactccagtctgggtgagagcaagactccgtctcaaaaaaaaaaagaaaaaaaaaaaaaaaaagaaagagaaaagaaatgggagagagagtcagggagccaaaggacaatcaggcaggagctcagggcctggctgccagagttttcttaaataagaaaatccaggaattaattcaaataggcagctgaacctatgctttgtccattattgatgatccccaaaaccaaccagtcaaccaaacaaccaagaaataacaccactcatcttataaatattcagtgggctgcaaggaatttactccctccctccctcctttcctttcttttttctttccttccttccctctctctttccttccctccctcttcccttccttccttcccttcttcctcgttccctccctccctccctatcaatgttaaattgctctccagatactccttcctgtctggtaatttcgtacatctagctcttcccaatctcaggatagaaaggccatggtgcttccccgcccctcctcgcctgttgctcacggggcaaatgcactgctcctctgtgcttctgatgtgagaaccaaagtggcaccaacagaactgagtggagagtctggggacgaaatagtctggttctggctgtcggacctgtggacaagccctgtttcctccctgcctctgccctctcacagtgtggtaggagcaaatgatgcctcggtctctgtctctgtggctccagtgaagccaaccgtgggtccggactagggttccaatccctgctccactccctacagctgggtggcctggagcaaggtacacaaccatcaaatgggtaacactaggacctcccctttagggctggggccagggttaaataagatgctacatactaaggactcgcacagtgagcactccataaatgctgtctgctattgctgttatgcaaaagagtatgcaatgggacatcagaccagtctcacaccgacaatgggcccaatcctagagtccactctgccagtttaaaaacaagttagccctattggccagcgtggcatcatcttattatgtaacacccatgacagtgctgggtacagtggcttctgagcttctagagaagcttaggctaggtcagggccttgtcccctctgctctgggctcccaggggtcccctgacttcgcacaaggctgaacatatcaagccaatcaggttgtgtaaatgagtatcctgtgtgccctgacagagcactggagaagcatacctggcctgaaggcaaggagatcataaactgttttcaaatgccactagccaaacaagctcccgcagcctgattcaatctgcaggttgctaattatgggactctccagctgcaagactgctggggttgggctgaacaatgattaccatccatcaccacaatttatttctttattcacttatttaagtaacagctttattgagacagaatttacataccaattcatccttttaaagtgtacaattgggggccaggtgcggtggctcacacctgtaatcctagcacttcgggaggctgaggcgggaggatcacttgaggtcaggagttcgagaccagcctggccaacatggcaaaaccctgtctctactaaaaatataaaaattagccaggtgtggtggcacgtgtacctgtaatcccaggtacttgcgaggctgaggcgggagaatcgcttggtggggaggtaggggttgaatctgggaagtgaaggttgcagtgagccaagatcatactgctgcactccagcctgggtgacagagcgagactctgtctcaaaaaaaaaaaaaaaaaaagtttataattgggtggttttaattttattgtattttaagccaagcagagagataccaatggttggtttttagtatactatacaggtattcacagagttttgcaaccattaccacagtcaattttagaacatattttagtacgacaaaaagaaattctgcatcccttggtaatccccccactccttcctccagccttaagcaaccctaatttagtttctgtctatggatatgccttctcgacgtttcatataaatggacttaatacaccatgtggccttttgtgtctggcttctttcatttagtgtaatgtttttaaggttcatacatgttatagcatgtatcaatatgcttcattcctttttatggctgaatattatttcattgtatggacagaccacatttttttttatccattcatcagttgatggacatttgggttgttttcacttttgggctatcatgaataatgctgctatgaacatttatgtgcaagtctttgtgtggctgtatgttctcatttcacttttgaaaatacctatgagtagaattgctaggtcatatggtaaagtgcatatttaactttataatcaaccacagaagtgttttcttaagtgcctgtaccattgtgcattcccatcagcagggaatgaaagttctagttgctccacaccctcaccaatgcttgctatggtcagtatttttatttttatatttttttgagacagagtcttgctctgttggcccaggctggagtgtagtggtgctatcttggccactgcaacctccacctcccaggtccaagcaattctcctgcctcagcctcccgaatagctgggattacaagcatgggccatcatgcctggctaagttttgtatttttagtagagacagggttttgccatgttggccaggctggtctcgaactcctgacctcaggtgatctgcctgcctcggcttcccaaagtgctgggattacagccatgagccaccacgcccagccaatggtcagtctttttcattttagtctttctgttggaggtacagtggtgtctagcagttttcatttgcatttccttgctgcatttccctgtctacactctgaaccactacaccctgctagtgggccctgcattggacacaggacaaggaatagatagtgccagccctggagggacccacagttggggtccgggagcctcaggtgcagaattagcctcagtttcaagggccgtctctgctaatccctcagggtaaacagagaagagtaagtgtaggtagtggaaattaaggcaaagcaaagagcatctggatggctgcaaggggaagctgggcagggccagagcagggagcttacttagcagtttggaggttggctgcctttgttttttcagcacgttggaatctcctggctactagtcttttatttcctttaattagcctcccctacttatggcgacaggtcaagatctctaggaagtgttccagacgactctgcctgacagacagatgtcccagagatccctatgttcactccttagagttaaaatgaatcctgtttcccatccctagacctgacttagggcaaaatagttttacttttggtgctttgacttttcattccttgctttccctctaacgctaagaaagtatattatttacaaaatatctctatcgcctagaaaatatctccctgggaagaattaaacagttacccattaaaaactttaaaaaatgcaggcatgcatcagctggcgttagtgcaccagtcacttttagagtctatttggtagaaaaacacgttactatggcgaaactccgtctacaaaaaaacacaaaaattagccgggcgtggtggcgtgagcctgtagttccagctactcgggaggatgaagtgggaggatcacttgagccctggggggttgaggctacagtgagccgtgatggtgccactgcagtccagcctgggcgacagaacaaaaccttgtctcaaaaaaaaaaaaaaaaaagaaagaaaggaaaaaaacaagttattgaagcttgaaggcaaagtcggctcccttgaaggcacttggttgtaaatgcgggcaccatcagaaattcctttaacagcaacttacatagtcaccactttggagggggtaatttcctaatgtggtgaggacgttttaaatgcgggcaccatcagagattccttcaacagcaaaaactcacacaggcatcattttgaggacagcgatttcttaaacgtgctgaggatgttttaaatgcttatagtaaaatactcagaaatggactgaaggcaaacaccagagacagagaaatcacagaggccagtgtcttccagtttctatggctctttgacaggcatgatctggtctaatcttggaaggttagttactttcccactttacagataagcaggcagcggccaagggagctctacagatgtaggagagacaccaagacatgggctccctgcctgcagcaatttccccagctctgcatgccttgcctgggttttgaaggagattgtggctgccaaagaatgtttggtactaaagaagattttaaagaaaaaatggaagagattttgtcattgcccatcctgcaggtaaagacaagtcagaagaggtcagccagtgcttggtgcacagacacaccctcctgccctttctccaggccaggaagctgagatgccccgggctgagcagtggggacttctgagaaagcaggcacaattcctagcctatcaagcttgtggtccagagcaggaggcagatatagaaagaagtaaacaggccgggccccgtggctcacgcctgtaatcccaacactttgggatgccaaggcaggtggatcacttgaacccaggaatttgagaccagcctgggtaacatgataaaactccatctctactacaaatacaaaaagttagctgttatgacagagaggtagacagggcactatgaagcccataggagaaagcaaccctttggaggatggtttagggttttctttacagaaaaagggacatttgagttgggccttgaaggatgaatagaagtacactggaagacaacagaaggaacaatctacaagtcagaagagcatgtgtgaggcaccaaaatgtaaaaccatggcaggtacaggaagatgtgggtccttgaatgatctggagcatggtgtggaagacagaaatagtgggaggaaacttggtgaactcagtagaggccaaaccccaaggaaccttaagggccaagctaaggagtttgggcccaacccattgaagcatttggagcaggggagtgacctgatcagagtatgttcttgagaaaatatcttggccaccacaagcagaatggatagagacagaaaagctgggtacaattatgtgaggcccttagtcagtgccaggcatggcccatggacctgtgatgtgccagcactgtgccagggacctgggattggaagttggctggcagcacttccaaaggaagctagaatccacctgttgcaccactgatgacctcttcccagtgccactcagctcaatccccagcaagcagaaagtagacattgaccttactcccctttcagggcagattccaggataccacatatcactctgattccaggatgggaaaatggccagtgctcagctgagattgcagtggccacagtaatccaggcaccacctccttgattcacaaatctctcacaactcagtgtcctaagtccggttgacaacccagttccccttatagccacaaaatgcttcgggaggtgggcagcctagagctggttagaccccttgctttttcagaggaggaaattgaggtacagagaggtgcccaggcttgcccaagctctcaggattaagaaatggtggatctggcagggcacggtggctcatgcctgttatcccagcactttgggaggccgaggcaggcggatcacggggtcaggagtttgagaccatcctggctaacacggtgaaaccctgtctctattaaaaaatacaaaaaattagccgggcgtggtggtgggcgcctgtagtcccagcaactcgggaggctgaggcaggagaatgacgtgaacccgggaggcggagcttgcagtgagcggagatcgcgctactgcactccagcctgggaggcagagcgagactccatctcaaaaaaaaaaaaaaaaaaaaaggaaacggtggatctgtgggttctcaaatcatcattccaggttgcttctcacgaagggtcagaaaaatgaacactgtgacacatgctatacatacattttcttacgtcagttcttatgactactcccattttggaagtgaggaaactgaggctctaagtaagattacatgccgtaaaaggcctgactatctgatgcctgcagatgcaccagtttgcctcccaaatctgaaaacagacttggatcaaaatttctttgtccactggcagcagtcgagcctgctttgctaagtaagagctgatgaagacacaggcctctggagatggcaatattttcctcactgacatggcaaatgacttgcaaaacactatggcattaagagaggtttttgcaacagaactattgtgacaaggcaaagagaccacaatgctctgggacttctcttttaaaaaaaatcatttttttctctttttgacaaataattcagatcctaggccagcatcagagcagccaagggaagttgcccctccccctggcggcacccacttcctcccaggcccaggagagaggggccgtgctggtactgctatctccctggcggctgctctctgagccggccccaggtaccgggggtttgttttatggatgggtctgtcgtgagtcaatatgataatgtttcctgtgagaactttatttccctgcattgtttgcaaagtctgtgtgtgtctgagcacgtactcctaatctgtggagtttgctgtgccctggtgtgcaggacacccctgggggtggggagcagggacctcaggaggccagacacaggttgtccccagccccggtggtggcagggagaggaggggtgactccctgctcaggccttgcctccagcctgtgctgggctgctggctctcctcctgttgaagccacttaaatcagtcctctccagctgggaaggactcatcgtgggccccatgccacaccagctgtgtgcacccatggcccctggggccatcttggaagcttctattcaggaaggtcaggagaggcccctttcagccccttgacttgcagatggagaaatccagaggttacatgacttgtctaagctgaaacacccaggccggaggtaacaggaagacaaggtgtttggagccagctggtcctgggctcaaattctgactttgccatttattactgggcaagtctcttgggcagtctcagttgcttcaacggccaaatgggctcaaaatactcacctcatagaccagctgtgatgatctgatcagaatacagacacacagcacatgccacagaaggtgcttggggagtattcattctttctccattcacccaggttggaatgcaatggtgcgatctcagctcactgtaacccctgcctcctgggttcaagcgattctcccacctcagcctcccgagtagctgggactacagacgcgggccaccatgcccagctaatttttatatttttagtagagatgggttttcaccctgttagccaggctggtctcgaactcctgacctcagatgatccgcccacctcgccctcctagagtgctaggattacaggcgtgagccacctcgcctggccttctcattttctcttaaataaggactgaggctggtatatacaggcaaatgctacacgacaaatgccattaaatgccattaggtctgtagagccatccacatacctcacccagaacagtcctttttggggaccatttaatcaaagctactaggctcctgaagtttcccaaacaaaaaggaaatcaccctggcattaagagatggctatcagtattagtcagtagcttggctgagagttttaaaagaagcaagaaaaaaagaagaaactttgtcactcccgttctctgtggcttccaagcccactgctcactttcttctctgccccctgcccccgcctgtgtgtcatactcagggctggccccgcactcctggctctgaccttacctggctttgtggcatctctttttgttatttcttttgactctcatttacatctttcactggtatggaactttccagcgggtagaggacattgattgttttgatttgcccagcatttatcttcccttcttctaaaatcagagcccagttttggttttgagaccccccgcaacactcccttcatgagatgcagtctttctaagactgttaataggagcgcccaatgatttttggccaagggagggcatctgacccaagccaagccaatcagaagcccttctcctggaacctgaatcttgaagggaataacacaagtacccaacacagttagagccacatcatcccatggaggtttcctaaagaaatgagctgggtctgcagctcccatcctgggagctgcttttgactctcccttaccacagtatgactggcgagccccttccctcgtaccttctgaataaattgtttgccttgcagttacagttggtgtctgttgcttgcaaccagagcatcctaagtcatacacagtgtacatacataaatgcatagatagcttccttttcaacttgtatcaagggcagggactgagccatttattcattttctcattcattgatcaacaaaccgttccaaataacctactctgtgccggttatgtgctggaagttgggagtgccgaaatgaaccatagtccctgctccaagaagcccaagtctacccttataaaaaacgtggcacttcttccttcagcccttcattcactcattcaccaaatgctcagtgtgcacccattatgaaccagaggctctgccggaactgggctgacagtgtagaggacagaatccctgcccacatgagatccttagcaatttgcaccaagttggtgctaaaaataaactcagaatcccagagggtcagagtctgaaggccgcccagaacccacatggcctgctggttttcaaacaatcctgctggtgggtcctgagggttgaatattgatgtttcataaaacattgttttttttttacagctttattgaggtataatttacataccataaaattcacccattgtaagtgtacaactcaaggatttttttagaaaatatatggagttgtgcaaccatcaccacaattcagtttcagaacatttccagcaccctacaaagttctctcatgcccgtctgcagtcactctttgcttgaagcattctagtttttagttatgtatttgatacagggtctcactctgtctcctaggctagagtgcagtggcacaatcacgtctcattgcagccttgacttcccaggctgaagtaatcctcccacttcagcctcctgaatagctgggactacaggcatgcaccaccacaccggctaattttttttctattttgtggagacgagggtctcactatgttgcctaagctggtcttgaactcctggcctcaagtgatccacccacctcagcctcccaaactgctgggattacaggcatgagccactgcacctggcctacattctagtttttaaaaaagaacagaatttgagaaccagtgaccgattctaaaccacttcttctacagatggggaaactgagggccagagaggagaaggggcctgctgaggacagcggtgggtccatagcgttgctgagattcaccccagagcaacctgatttcaaagcccagtttcctcccactcatgggaagcagttctgaggtggagttaagagtcctcaaatcacacagtgggggttccaatcatggctttaccatttataagctgtgtggctgtgggcaaaatgtttaacctgtctgggcctcagtttcttcatcggcaagtgtgggaagcttagtctctgccccgggggttgctgtgtggattgtgtgagatcacaggtgtaagatgcatacgtagcacagtgcgtggcacgcagtaagcattcagggcaagttggctaataatgatcatttcaccacatcaccctctccctatttgtcctcagaaatctggaagtggaaaagacagtgattaaacaaagccctgagtagacatgggtgtacagaggcagctttctaagaacctggtgaaataccccaccctgggcatcatcaccccgtgtggcgaatggagcaactgctggggacttgctcaagtagcctccgaccccgcagggctgttccttcctcccagtttcaggatttcccaacaggtccccaacagacgcatttcatcagcctcaggggagcctggctcccttcccgccccggcccagaggcgcctgatgggatggaagctggttttatgcttctggatccccaagaatgatagggccccacccttctgccctccccagcagcgtctctctgccatcagtgaagcagttgagcttgatggagatgggcagcgcacccaggaagaaggcagaggacttagcccaatgttacctgctgtgtatgtgttatcttcgtcagacctgcccatcatgcctgcttgacattagaggaaattaaaggtcagagaaagggggtgatatgcccaagtaaggagttccaaaaacgtaacagtctgaggtagaccaagagatcagaaacaagagaccagaggtgggatcaggtctaggtaatgtggctcccaggaagcagagtgactttttttttaagcacacatacattagacataatttagacacgttataaagagctctgcgtttgcaatgaagtaaatatgactctgaaggactgtctagtttgctaggctgtgctaatgattagagagcctgctcgatgagtagctacttaccaagctcctcctgactacaggggatcgagattacaagaggtaaaataacacccctaattccaagagcttcccaggctatggtgtggttggacaaagtcctacaataatctaagtttgactgtgatgaggatcagaatcacaggactatgggagaactaaggagggagtcagggagcatctggcattgaagggtgaattcactgttgacagctcaacaaggctttgtggccctgtgtagctggaactcatgggtaggaagggcagaggctggaaaggctggctgatgtcagattgtgagggtcttgaatgatgggccattttaactttatcatgtaggtcatagggagccactgaaggtgtttgagcaagggaatgacacaaccagagggctctttaggaagactgatctgatggctgttacacttggagtcaacaggaaaaataagagtgttctttaggccccttcctttttaaaatttatttatttgtttatttattttttgagatggagtctcgctctgttgcccaggctggggtgcagtggcgcaatctcagctcactgcaacctccgcttccatgttcaagcaattctcctgccttagcctcccaagtagctgggattacgggcatgcaccaccacgcccagttaatttttgtatttttagtagagatggcgtttcaccatgttggcctcccttgatctgcctgccttggcctcccaaagtactggtattacgggtgtgagccaccacgcccagtcaatgtatttatttttttgagacaagatcttactctgttgcccaggctggagtgcagtggtgcaattatagctcactgtaaccttgaactcctgggctcatgcaatccttctgcctcagcctttcaaatagctaggaccacaaacctgttccaccacactcagctaattttaaaaatttttttgtagagatgagatctcactatgttgcccaggctgatctcgaactcctggactcaagcaaccctcctgccttggcctcccaaagtgctgcaatgacaggcatgagccactgtgcctggcctgggccctttccttaggctccatgactgaatgaaagagcaaacatgatgaattgaacacctactatgtgttaggcacttgctgaatttagaaataaataaatgtcttgtgttaatgcggtgattactcagtcaccagagagcagatgataatttggggaatgggcagtactgctaaaacccaacaccaaggagaggggcaatctccagcaaagaaagacacagaagaaccacaggatggtcaggaaaactcgttcaatagcctggaggctgctctacagccaccctcagagttcacagtgacggcgctggcagtgaaaaagtcactgatagtctgggtgctttgcttgccaatgcagggaaccacttattttatcatgaacgtgaataaatatgcaatgagcacaaacaaaaacagtgacaggtgcagcccctccctctgggtcctcctgggctattggggatagcttgaatgatgctccagtgaaaccagatgaagtgggtgaagctgaaggtggacggtgggccacacagagtggccttctcagtgctcctgcctcacctttgattaaaggtgggccatggggctgtggcctttaatccaagaccagatactctgagacccaccacctctgtattgcctgggctcaggccaccatgcacaggtgttgctgccactaaccagaaaaatggctgtcagtcttgggcttccagtcactgcagccacagaaggggaacctccgtgttgtgctgctggagataaggtttggggggctgatgtccactgtccaactccatgactctcagtcgagatgcattcctgccaagcctccagctgctttgtcctggataccacaaaggcagatgcaggccctgagcccaccttgctcaaggcacgtgcccaaaggccacctgatcccagctcaggcaccagtggctccagttactcccttccagaaaacctaaggtcctaagagttcaaaagagggcgaggccatagaaggccagaatgaccgtggaagtgaaccaagaaagacgaagagaagagcttaaatgaagtaggacagaaaatattgagaaggggaatagaaaacagtgacaaaagctgcaattgcctttttgtttagggtaggtgtatgctcttggcaggataattcgttggcctattaatttctgccttgttcttgtgaacatacgagagacccaagaaagaggccaaggcccaagaaaaatcaactttcctccagagaatgtcatacccctgaaatcctgtgctcccagaggtggtggagctgactattctggaggaagaggggctcaagggctagacagaatagaaatcagggggctgtgtccatggagactggtggaggcctgggaggcggtctggagctgagccgccgatgaacctgccggcttggaggcccatggcctggggacctcggtcagggcctcctccctctctggcttgaccttcagggacagaacacccaggaagcactgcagacgtagccatgagagaaggaacaccgcagaccccctccagcacctttgcagattgcccccactctgaaaactgacttaactgatctagaagaaaaatacatttatcttcaactgttcagtggaacaattttgtaccctgttataaaggcatagagacgtcgattgaaaaacaaatcaccaccaaatattagtagtggcatttgtgtctgtgttgtccaaagtctgtactttgtatataatggacaggaataatttttgtcacaaaaatttttaagaggatgaagcaggtttccaaacagcatttcggttacaaattatgtaaatgcctgtatgcacttggacaaaaagcttgagagatgttaacggcacttgtctctcggtcgccagcttgcagtgggttcttgacttcttattttcattttgaaatgaatatctgaaatgaattcacttgaaactaacagagaatttcattctctatttgactatagtttttttctataataagatgaattacatggaaaagaaaaaaataaatggaacatttttgaaagggcgagtaaggaatggctccctccctaccctcatagcccctcctggacacagaagaaggaaggacattggggtgggtagctggtctaagtagagtctcgcaggtgacagtgagcctgggttgagttgaggaccatctgcacaggtgcctgcagtgtgcaataagttcggctgggtagggagggtgggaccagatttcaaagcctgttcatcaaaatctttttcctctcagtgtgagcatttgcatcaaacttttgtgaaagtgcccgtatctacccttgtgaggcagacagccctgaaccccataactggatgggggggagcctctcgtgcatcattcaacatgaaccttggttacaattactcattcaacaggcatttactgggtcccaactatgctaggctctgggatgcagggatgattgtggtggagctggtggaaggggcacaggcttcttcacacagacctgggtaagaggcccagttccacctcttcacagctggcaaggctttggcgagttacttaatctctctgagcttcagttcatttctctgtaacaatgatgagactacaacttcccctgcagggggctgtcaccagggttaaatgggataatcacataggcaaagcccctagtgtggagatggactggcatatcacggaagctcagtaggggtcctgctcctgtgtccttctcccctgggtctcctgaaacctcctggccttcgaagccagaggggagaggcagatatgaaacagaatctttacacaatggtcacgatgatgagcaatatgaatgagtaattttgtgctcagagcctgaacagcatttcattctcagaacaactctgggagcaggggtcatcattcctatttacagaaaagaatacttggggtgaaagaggccaggcactttgtccaaggccacacagctagaaagtggcagaggtgggactcccttccagacctgtcttgctcttggtcatggaactatattcttctccaatctgatcaatggcaacgcagggatctgtccagggtgttgctggaccttgaaccatctgctggagtctgccaggttctgggtcaagcagatgcaaggattcttaagatggtgactgtacccataggggttcccaggctcatgtgaaacttagatatggagcacctttcaggatagcagcctaaattgataaaaaaaaaccatcagtgcattaattagcttgatttagccactccacaacgtatatatatttcaaaagatcatgttgtacacaataaatacataccatcttatttgtcaattaaaaacaaataaaataaattaaaatcttaaaaaacctcaccaggtcaatgagtatttaccaattgcttccaacaggccctagaattgttgaattctatctttgtttttagatggggtctcactgtgttgcccaggctggtctcaaactcctagcctgaagccatcccccgcctcagcctcccgggtagctgggactacaggtgcatgccactgtgcctggttttagctcactgaattctcacagtgatccacaacacagagattctcatccttatgctaggtataagactgacagcacacaggtccacagacttgcctgaagccccacagcttgcaagttgcagatcaggatttgaatgcaggtctgctagtcacttaatgccccacatttaacccctgggcaacactgccaatccggacagcccttcaatagggatcctaatgtaaacacaaggaaatggctgccgacccaaccatgcatcctgggagcagggagcgttctccttaaagtaaggtggcagactgtggtggagggtagccctgggtttgaatttcaacctgggcacttaataactttgtgaccttgggtgtgtcatgtcccctctctggcctcagtttcctcatctataaggggtgttgtgaccatatgaaataatgtctatttcaatgtcctgtctcggggctgccactctatggacacacccaacaaaaacttgttgtgttggtatctaaggaggccagcattgtttatcagagcctctgactggcaaacccttgacccaaaccgttgcacaacgctggtcctgatcatatgagcctttgcgccagagctcaggtcccctgagtccccatggccttatcctgagatgctgaggctccatgcctgtggcaatagttgcttcacatggcggcaactcttcttgcaatggggaacatggaggcagccaagagctcagtggggtcacctctgtgtgctctgtcccagagcgggcctgctgttcttggggattgctaaatatggccatgtgtccctggcaccattcagggagctcctgccagggctagagagggctggaggcagaaacagttcccagaggccaccattggtaggggcgtagatgttcgatcctgccatctcttccatttgtccaccttctaccccagagagatctgtgctccaatctaggttccatcactttttcactctgtgactgcggacagctcacttctcttcgctgagccttaatttcctcatctgtaaaacagggtataccattcctacagttcagggttgatgtagagattaaatgacatgatgagtgtgaagagccaggcccacgatgtggcccaaagagggtgctgagtacatgtttgcttcctgatgaccttggacaatccccttttctctctgggcttcagttttttcacatcaaacatgagatctgatggcctctgggggcctttcctgctctcaaggtctccaggcttgttcccaactggaacaacaatctaaggtggtgtcagccattaggcagaaaacagtggggcaggatcagctcaatgtcactcggccaccactggaggctctgggcgagttgcagagaggcctacagcttcctacccccaccctccaagcactaaggaccttccccttccagggtctgaatatgggcacagctggctctctgtccaccactaacttatctggagcttctccaaggccacttttagccacttgagccttttcaatttatggttctcttgaacactagcgtgtctggcctctccttattcaaactgtacattaactttcccaaaataatataagctcttggggaaaggggctgtggtgcagggcttgcatggtgctggggcacagtcaacagtcactaaatactgagtgcctgtacaagccagctctatgctcacactccaggaggatgcccagcctcctggcattcatgctcttgctcccttgttgcagtgaatagggctggcctgtgtgacctataggatcttgtgaaaataatggaatataacttccaaggctaggccataagaggcactgtggattcaccttgctcttttagattcctcactcggggaagccagctgccatgttgtgaagatgcagcagggaggtctacgtggtgaggaactgaggcctcccgccaacaaccacatgtacttggctgctacggctgccatagcaaaatgccacagcctggggaccttcaaaaaccgaaattaattttctcacagttctggaagctggaaggccaagatcaaggtggcagcagggctggtctctggggagggctctctcctgggcttgcagacagctgtcttctcgctgtgtcctcacaggtccttcttccctgtgtgtgcatgctcctggtgcctcttcctctttttaaaaagacaccagtcttactggactataaccatctttatgacctcatcaaaccttaattaccttcccaaaggccccaaatacaactacattgggaattaggacttcaacatacaaatctggaggggaaacgttcagtccataataccctgtgagtgagccatcttggaaatttgttatgcagcagtagaataactgatgcactagaagtataaaatgatgtatcagtctgattaactgttccttccctcttctgagggactctgacttgctcacatcctctggtgccaacacatgatattttatcctgcatggaaattttctgcaattgtgctttgctgcccagcatttttagggcctcctgggatgttggtctagaatgcagaccgttaagactctacatgagacctattttgcagatgcctatgcttttggtaccccgtgtcccatccctcagctcacttctgatttcagccacagctgagatggtgaatggtttggtgcaagctgagactcacttgcataatcaaagcccctcacaggtaaatgcagcacatctccttaccttctgcaccaggacattctcctttctctgactatgggagccttctctgcacataaataaataccatcaggatgcccctggggcaatcctcaaccaacagggatgaggcctgtccttcaaacgaaccatcttgggagtatttctctatggggagagcagcaactcttcctccctctttgtctcactctctcacacacgactggttcctctaaatctcctcccccacacactgctatgcccaagtccctgtctcaggctctgctttcagggagtagtaagatgtgctgggtgccttcattgcctctctggatccacgccccatgctttgcaccctgggaggctgacttgtatggtttgcatcaacaggcatcctccccctctggtttctggctggcttcagtcaatgagacatatgcaggaagccaggttggggaaacagagagggatccaagatttattcccccagttccttccccacggtgtccccacaggctggctgcctccctggaccatggtcaggctcctgtcaggccactgtcttcccacagctgactccctctacaggttctggtgacttgtggaaggtgactggtcctggactcggccccatccctgtggtttcactacactctgcccgcccctttgtaaatgatccctttattattaagcactcttcaaattacccacttcgagtgtgcctgctgtatcctggtgggatcttgacacaattctctttgtgctccatgtcctgttgtagatggaataaatcatgtttcccttaggtgactatagtggttgcaagatatttgctccagaaacgatttccttttcctttggcaacagccctggatttttgtttgcagaaattcttgtctgcccagtgtggttcgggtgggactccaacctctgcttcagggatgggcatgtgacatagggttaagcccattggctttttgcatccccctggacacagcaattgggtaggtggtgcatcatgtgaccttggatagaccaatcaggttgaagtttgaacaccagcaggtgctgcctaaaaaacatggcagtttctggtctggagctcccatgatcctgctagatttcttggcggtgactacttcaccttgagctgagctgcggtgtggtgtccctgccaatttaaaaactacgtgtccttgggtaaattacttagcaattctgtccctcatttacttcttaaaaaggtacatggtaatttaataagtgccttattgagctgtcgtgaaactaaatgagataactcatgaaaagaacttggaacagagattttattaaagcaactcttccaggatttaactggaggccttttctgttctaggacccagatagaagtcaatggagctgggctgggaagacatttgtgacagcctcctgctgaacttggaattgcacctcccaccacagaaggctttgctaccaggtcaagctcctcagaccggtcattcctcactcttttttttttttttgacagggtctcactctgttgtccaggctggagtgcagtggtacaaacacagttcactggagccttccagggtcaagtgatcctcctgcctcagcctcctgagtagctgagactataggcatgcaccaccacacctggctaattttttaattttttgtagagacgggggtcttgctatattgcccaggctggtctcaaactcctggcctcaagtgatcctcctgccctggcctcccaaagtgctgggatgacaagcatgagccaccatgcccactcaccactctttaagaggcttctggttgctcacaggtctggtttttggcagttccattccattggctcccggatgtacccaggtatgtcagaatcacccctccccatatcaacacaaattagcatccaaacctgattttccacacttcaaagagacaaggctctctgaagagggtggaagctgggtcctgggaagcatcattctggaagggctttgacggctggcttggctgacacaagggggcacagtgctgccctgcttgctgtccctctagtctaacctttcctcctaagcctcctcagtcattgctgcagagactacccccaggacattttgcaaacagccatttggtctcagccaggcctggacccttagtgaagcaggacaaggagaagggaaggagcttcctaagctgtctgaaatatgcccttgttagacgaccgaccttccttccttccttcccatcttctccttccttccttcccttcttcttccttccttcccttctccttccttccttcccttcttctccctccttccttctcttcttctccttccttccttcccttcttctccttccttccttcccttcttctccttccttccttcccttcttctccttccttccttcccttcttctccttccttccttcccttcttctccctccttccttcccttcttcttccttccttcccttctccttccttccttcccttcttctccctccttccttctcttcttctccttccttccttcccttcttctccttccttccttcccttcttctccttccttccttcccttcttctccttccttccttcccttcttctccttccttccttcccttcttctccctccttccttcccttcttctccttccttcccttcttctccctccttccttcccttcttctccttccttccttcccttcttctccttccttccttcccttctccttccttccttccttcctccctccctcccttccttctcttcttcttccttccttcctctttctttttctttttctctctttcttctttcttttttggtcccactatgttgcccaggctgagtgcagtggctattcacaggtgcaaccatggctcaccacagcctccaactgctggcctcaaatgatcctctggcctcaacctcctgggtagctgggactacaggggtgtgtcaccatacctggctagagtttcatgtcttcgggttaaacattgatgtattcagattcccctttaaaaaatgtaatgtccaagagcccttttaggatctggaatctggctcatttcccactattctttcatatatgcccaatgtcccatccccagtggacagcttagtgtttctggaactgggctgtgcttggttatacttctgtgcctttacctatactgttcctttacctgaagcacccttactcactttctccgcttgagcagctcctactgaacatttaagacacagcttaggctgggtgcggtggctcacgcctgtaatcccagcactttgggaggctgagctgggcacttcacctgaggtcaggagtttgagaccagcctggccaatatggtgaagccctgtctctactaaaaacacaaaaatacacctggcttggtggtgcctgtctgtaatcccagctactcaggaggctgaggcaggagaatcgcttgaacccgggaggcagagattgaagtgagccgagatctcgccactgcactccagcctgggtgacagagcgagactctgtctcaagcaaaaaaaataaaaaaaaagacacagcttagttgttgcctcctccatcctccaggctgagttaggggctctccattgtgtgcccatagcatcccatactaagttccgttatcgcccatatctctgctggtaactgttggtttacttgtctgcctcactcactagacagtgcatttctttcttttccctttcttttttcttttcttttctcttttcttttctttttctttctttctcttctctctttttctttctctctctttctttctccttccttcccttttctttctttcttttttttttttatagggactcactctgtcacccaggcaggaatgcagtcgtgtgatcacggctcactgtagccttgacttcctgggctcaagtgatgcccccacctcagcctcccaggtagctgggactacaggtgtgagccaacatgcccagctaatttttgtattttttgtagacacgaggttttgccatgttgcccaggctggtctcaaatttttgggctcaagtgatccacccacctgggccatccaaagtgctgggattacaggcatgagccgccgtgctcagcccagtgcatttcttcccccctctctccttcccttccttcctccctccctccctctctctctctctctctttctctctttcttttttgagatagagtctcactccatcacccaggctgaagtgcagtggcgcgatcttggtttactgcaacctccgtctccccaggttcaagtgattcttgtgcctcagcctcctgggtagctggaattacaggtgcatgccaccacacctggctaatttttgtattttttttttttttagtagagacagggtttcggcatgttggccaggctggtctcgaacttctgactcccaaagtgctgggattacgggtgtgagccactgcacctggccccagtgtgtttcttaaaggcagggcccatgacagattcaccccagtgtcctcagcattcaggatctgggtatacagtaggtgctcaagcgtgttctcgctatctgtataagtgggtgactgccgctgtcctaactccagccacctctattgctaacctgctgtctacttagtttggcctcctccaacaagcagaccctgagaaaggatttgagtgcaagtagtttatttggaagataagagaatacgggtaaggcagtgagtgaggaaatgagacctggaagagaaggcagccagaaaagttgttttcaggcaggttggcactgtgggagagtggctctgaatcccactggggaaactctgggagtcagtgcagaacagatatcctacctgagatgtgagggagcaggggtctatatgccccaactaaattaatcatcagtcctcagtcaagagcactcctggggagcactgagaccctggcaaatctagtcgactgcatggaacagcaaagcacacttctgtggctagaaagggctcaggcaaggaaccacaggggctggcggccagaagtcgggccagtgtgcacccaggtggtaaggccgagggacacgggccagcctcctgcattggagctgctgcagcagcctcgtcagtggtccctacctccagtttctccatcccaatcccaacccacacactgctggatgtcagggattgtctcactcatctttatgtccccagcattcaacaatagggcctgtctcagaggtgacacctggtgagtactgaacaaatgaatgaacaaatgactgaatatgtgattcaatggagggctgtcaaattagcaaagttttcatgcctggcaggagaaattaggggtctggagatccctgggagcccaaacgcagagagagagagacagcgagagagagagagagtgcacagaggtgggtggtagggtgagggcaggagggatggaggtgggcagtgatggggaggagaggggacttcctgtggctttgaggctggctggccaggtggccatgaagaaaggctcttttcatatattttatggggcggggaggctccccaggccggagggccttgctgctgtgggaacagtttccgccctgggcctgtgggattgcgtgactcctggagcactgggcccagggtgtggaggcaagcaaatgccattagccctatcagtgatctcccggtgcagatatggaagtttgaggaggcccagccggctctgcccaactgtaaagagacgtgattgaggcgggtcatgggaaggtggcagtgattaaggggggtcgagtcctgctgacttcctgcccagcaggtagtggtgaccaagggagtcagaggatcgggtgttagtcacagcacaaaccctctcacaaagcttgtaaaaaccaggcagaaagtttgctgggggacctccaatagctccagggagaaaacctcattcccttggagctggaattgtacctgccctgaggactgactcaggagccgcgggtacagagacaccaggtcaggtaacagtactaataacacggcggccccaggagtgctagtctgtggtgtttgcgaagcactttctccttccattatctcatctaatcctccatatggccctgttaggtctgtagaaataaggatcacctccatctgattgatgcgaaaacggaggccccaaggcttcatgcttgaaaacatgggggtgggaaggaagaacgggcagggcttctgagccggggctgactttcagcgctgttttggcgctggctggggtccagggatgcagatcagggcaggagggggcggtggcagcagcccggggagaaggaatctgaagagtgaaaggactctgccctgtggggccctgccgtctgggccactgctgccctgataataaaactctctctcccagaggcgagataggcactcagggaacctttcctttgagttaccggagagaataaagtcctgtgaaggagtcagcaaggcatgcctcttggacggtgtgcgcgtctgtgtgtggagacagagtagaagaaatacccactctggggcagcataaacagccacaggggagggggaggcccatttatggaggcccctaaccttcaattcccagaggtctttggttctgccaatttgaaggacagtcaccgtatttgaatttagaagaactcccagttctgtcacttaatggcctcagtttacccacctgtgaaatggaacaatactatttctctcagatggtcactgtgctggagaaatgagatgacgggcagttaaatgggaatcccatttctccagcagcccccggcatgcagaaggcgctctgtacatctttagggagccagtggatacaaagacaacgcagacattcagacctcctgagcccagtgggaaaatggggtttgcggggcaagatgattgacctacggtcctacagggagctccagcaggaacacatgttggcctcctttactgtggctgttctgtaaccctggtcaccttcttccccagcctgcctgcacctctaagctccagacacccatagatcaaacagccaacgagacacccccgcctgggtgccccacagatacctcaccctcaggatttctgaagcagaacttatgaatgttctctccaacaagccccctagtccaataaagagcatgtccctgtcccacaatccatgtcacctgagtatcaccttgagagttccccctccctcacctccatgttaagtagatcctggactgtttcccaaatctgtctactccttccgaccccaatgccagtgccattccctcaccatgccactgccacctcttatctgtatgatggtcacagcctcctcgtggtctcccaccctccagtcaagtcctatctcctcggctgatgaagggatcaccagagggaatatctgatttgcaacttccctgcttaaaaccttccaaggctttccatgctccctggataaagtagaaatcactccgtccatcagtttaagtcccgacctatattaaaaaagccttgattctattctagtgttccagccattcctcctcccccagcaccctcatatcccagccacatctcaatatttatacttcccaacatgccacgtgcttttgtgcatgagccctttgccagctgtttcttccttgtctgcctgggccactcttataaatcctcccactcatctcaaatgtcacctccactgtgaagccttccctttacctccccggggcagagtgaaacctcttccccacttccatagcaacagaaaccacagagctcaggttatctgggaaatttaaaataaattctttcgacgtcgaatcataagtgcaatgtggggctggagaaacatggctgtcctctttcgtcgtgacgtgcacaaccctctgtcccggcatttgtggcattgggttacgtgctaagtgctctcatacttcatctatctcattccttaacggtaactttgggaagtaggtatgagcttgcccaattataaaagaggaaacctagacagttacatggcttgcctacggtgatacagctaagaaatggctgcgtgggggatttgaacccgcctgcctgcctccgagccattccactcctggcacctgtcgggtgtcttggcgttgccagcgtttgtgtttatctcttccatgagagtgagttctttggtgacccaagtcatgccaggcttatctatgtatccccagagcacggggacagctggggacagagaatgtcagtgagcatttgctgacacggagctcaaatcttttcctcttccctcctctcaggctgaccatgagtgaccttttctcccctttcaggctgtctcctgggctccattttggccagatttcctttgtctccaccgtgcaaaaagcagggtcacgggactcaaagtctgactattacccaggagacgctgggcaaggaacttctctccctgaaggacaggagggtctgtgcctctcaaagtggggtacacagccctctcttaggggcacccgaagccataggaaagatgtagtgctccatgctggggactctttttcttctcaaagttttggggtaggtagaaataaatgaagtcatttaacttctaaatgatactttatacattaattttaaagttacaaatatatataatatctatatataaggtatttacatatataggagtaaatgacaaagctcatgttaactttcagaggaaaacctgcgtgggctgcattagactacactcctcacatctccagggaacatgatggaaacatgcaggaagcaccccatagggtcgcaccgggttcccagctgcaagcacccaccctggctagggacgtaaggagatgcagaatgagtcaagctccctttccttctgccgtggttcctaggtcctctcttgcagcaggtctcatgtaatggaaagaccatggctctggggctaggaggacctaagttggaatcctagaatggagttatggctctgtgacctcagagttcagtttctctctttccctttgagtatcatgggcttgagaatactgtccacctgtgcggaatattctccttgcccctcagatgccccctccactcttctctaccaggctgtgtgctccaggaggctgaatcgcacgcatggtatccattggctcttttgctctctggcttccagctggacttggccaatgggagactttggcaggaggttgagaggagaaaaggactcctcttggccatgctggagtgaccagtggttgcattccttggtgttaggggtgcgactcctgaggggagcctcttctctgcctgcagccctctggaggttgtgccaccttttcttcccttgtcctttagagctgggcgggtggggggtaaaggctttctgcggaggccggccttggcatgtttcactatcctttcctggtttcccttcatttaaccctcccacgactttgaatctagtctctgcatgacacgctcctcaatggtctcttttgagtgtgccatttccccctgctgggatcctgacccataaaccacctcaccgggcttgtggaaggattcagcagacagagggcagtttataagtaaagcttgtacttggtgctggagaatacttgctatcgtgaggtgacagagtggggagacaggggacacgaggggggcagccctggctagaatcttgacagtaggaggcaactcctaaaactcctccttccccagcaaccgtcccccaccctgcagccctgggaggcctggctggggagaggcttttccagggcacgtttcccactgctgtggcagcagcggcagcatcatcgataacacgccggctcctcggaggccttcctggctccagcccatctggcaggctcaggcggccagagaccccgggccaggagctgccaacccgctgactcagcacaacgcccctctctgagcagcttggctttgggtgggaaccagccatccatccggtgtccctcccctccccttggaggtggctggaccagccccaggcctttaataagtgctggctgttgcctggtccaggcctaggtcgctaggagggctgaatgcaagcacaggcagcagagaacacaggcctccgagggtcagccagagagggctctttcttcctgccagcctcccctggaggcccccaaggccttgggatatcagagctagaagggcagaccagctctctgtggagatggggaaactgaggctctgagaaagtgacttcccaagtcccactgcaaacccctatcagacccaggcaacactggacaggtcctcatgggcagagtctcatgatttcttctctggtggtggatgctggttaccaatgtcccctggccaggatgagctcctagcaaatcctgtgaggttggaggtactcgtcttttgaagattttaatagtttatgggacttaagcacttcatccacttatgacctctcattctcacaacaactctatcagataggaattggggacttcgccaactagatgaagaaactgaggcccagagacaggaagcaacttacctaaggttgcacagatagtatgcggcagaaccaaagtcaaactttagtctttcctgccctaacgcttttgctctgccaaccaggcaacactgtctttggttattctggagacagcacagcataccaagaaagagccctagcaggggtgggcctctggaagcctgaggtccagcctcagccctgcctctccatttttctggcctagctccttcacctctatgggcctttcttatctgtaaagagtagtgatcaggcttgccctgctttttttcatttactctataaaacatgcagggtaggtgctgctattcccattttatggctagggaaactgaggcccattcatcatgaaggaattagatgtaatttgctgagatagttctacaggccaggtatgatgtccccagagaggaaagtgacctacccaaggccacatacatagaaaatggcagtgctaagtctcaaacggacaatgggggctctaacctacactttccggcttccagtattgtggaaaaatggccaggggatcacaattttccaactcttgcgggaagccactaggatcctccttgagtcaagcccgtggcactaaatagaccccaggaatgacactctcctgggaacttttggcctggaacatatttacacagctccggaggggatgaaaatatcccaacccactccctacagactcaaattagcaattttcttattctttataacccctctggaaattccaactatgtaatattaggctaaaattaggagtgtaagtcacaagagaaaagtcccactacttggggagagaatgtttttgtagcctcatcctgagcatgtgttctaaatcagaacacagcagttgtctttcaaatactgtttttttctcctaatccttatagattggaggcaaaatcttttgagagaatgtatttttactctactgccaagtgccaaattcaatcccggctttgagtttccaggctcctcaggtgaggtccagaacacttgcacaggaagacctgtcccgtgggcccagaatgcctccttaaaggtggggcactttaacagccgcggcaataacgttacccgcagccaacactaccgactggtttggatgtaccgggaacctgtgtgaagtgttttacaaccattattacatttaagcctcataacagccctctaaggtggatattatctcattttacatatgagggcaattaaggcctagaaagattaagagattggccaaagccatatggacctagaaccatagctgtgaagttagacttttaacccaaatcagcgtaactctgcattccaccccagggtgccgtctccaataatagttgctatttattgaacacatactgtgtgctacacacagttctaagtgtcttatataataatctcttttgtttttaatatgcttttttttaatttttatttttggagacagagtctcactcttttgcccaggctggagtgcagtggtgcgatctcggctcactgcaaactctgcctcctgggttcaagcaattcttctgcctcagcctcctgagtagctgggactacaggcacacgccaccatgcccagctaatttttgtatttttagtagagacgaggtttcaccatattagccaggctagtcttgaacttctgacctcaggtgatctgcccgcctcagcctcccaaagtgctgggattacaggcatgagccgccgtgcccagcctctaattttcttgaggtctatgaccaatgcaggccttttctggacatgagatatgggacaggcaggctttgacatatgtggataaaaatgaccatgagatctccatgaattagattaagaaggtgaaacgaagctcctggaagcagagggcctttgtagcttggggcaatatgagcaacggtagggaatggatatcaacaggggatagggccagtgtccttaagctgtttatgattgaggcaagatattgcgaccagatgaaagggaaggaggtgagctggagcccccagggtgcaggagcaagcatgtggtaagtgtgagcccaggggcagagccaggcctgcggggtggaaatcacccagggccttagaggggagagagcttcttgtctcttcagtagttgtctgtgggttgggcaaccatcaggagcattgtagagagaatttctactttggggagtgttgactttcggggcgctgactttccaaattgcaaatttgaccatgtctctcttctgcctggcagcatccccggatcccagttgctaccaacacagcccgagagagctcctcgtcagggaggacaaggctcccacaatttgccgctgactggccacatccacattttagcctgggagctgtgggccacgcccctcacctggccgttttctgaacgcttggagaatttcacactcttgggcctatgcacacgctctgcaaatcctttcacctctctaggcacttgttgcgtctgctgagctgtgactactcatccacagactgtgccccccttgagagcagggcctagtcgcggtcaccatcataacctgctagacatgactggagtatggattatgtgtttaatgaatgcggtggggctctgggacattgtatgatcttttgaattcttaaaaccctgctatttcttttcagttggtgttaaatggaggatgtaccaggtgcaatcccacggtcagggtggagacgtgcaaataacaacattcatgatgcagagacagccaggggctgaggtcaagaaccaggatgagggggtgagcagaaggtagggagggggccacctagtgaccatcaggcatcttggtcctcctgtctcataacccaaactcttggagtgaatgagtaggaaaagggggaccagaaagcaatggggatgggcatggtggaaatgagctttggttctttctctcaggatgtagaattaggagccccgcacccgcccatctccactaggtatttccaagggaatgggtatccagaggccaacatccagcccctctctcacccagctctttccatcagcaccacacggtcagcgggtgatgtcaagcaaggaggacctgtccaggaaaatacctgctttttagcctcgagggagccaagaaaaagtcactggagtccagaagccaccaagaaagcccgccacagatgcctctgtccccttccctctttgcccctcagtggaggtggtgaagctgcccctctggcttcctctagttggaaattcgctatgtgacatcagctagtgctgccacctcttccgaccctgagcctcctaggctccttgctctgcacccacattgtaaaaaaggagccagaaactcaggccagcctaatttcttatggcggctggagaaacagggtgtgcagctttgtttcttctgtgtgtcccctcttcgttcctgggctccacacacagcgggaggaaggaaaagggagcccgttccagggaggtgctgggggagggctcttgtgggagcctggaaaccctttcttgactcttgaccaaagttacttttcttcctatttttattaacacacatccctacatgtgtttgtgtccagagaaagtactatgaataactgatgacagattcgttaacttatgattcatcctgggggagagaaagagggagaaaggagcaggagctttggaggctgaatataaagtgttgtcaaatatttagcaaatgatcttccaagccacagggaaaaagtcagagatgggaatttgaaagctgccaggatttaaaagccatttaatgctaaccatcagtgccagagagctgagagcgtttctcttcctccttccattggcagcaacagctccgataatgtggaaaggcttggatgggctgcggagcgctggtgggaactgagaccaggcagcggggctgaaagactttttgttcaagaaagcttgtaaataagggagcgcctcagaagtggactctatcttgtctactgcctgtacattctctcttccaagagatccctgaccatcagctctctacacagaagactctagccagtcatctgggtgtttgaaaataagtttcaaaatatcctgatgtttggcatcaaggaagaaaaaaaaagagccatatgactgactgaatttgtcactttccttccaaatgttttggtgttacttagacaatggcttcagtctttgtctatctgtcatcctaaaggtttgagctcagaaaggtctctcctgaagggttaggaatcctacatttttagggctggggtcagtactcacttctataacctgattctttggagatatagttatttttaagcaaaagatgaacaggtctttcttgatattttggcttgaaaacctcaagtctgcagttatgtctcctgagtgtaaatatcctaaggcaagataaattaagggagaagtggcagggaaatttaggtcagtggaaataagcgtcccgcacaacagacacctccagatagtttggttacactcgtaagcttgtccaacctgccttattttgttgttgttgtttggtttgatttggtttggtttaggcttttagtagcctgaagccatggtttttaatttctgtccctagtggtaagtggaaaagagggatgaggaaggggctttattggcccagtcagaaacagaaatggagaacccatgactctattctctcccttagacaccccgtaaggcattcttcaaagacatagtatgatgagttcatgagtagccaatgcaagtgaatttggtggattgaatcaacgaatctattcactgtgccaagaatgaatagattgtcacgccttcagggaacttagaatctatctgcttgggaggcaagcattccattaatgatgcggatagttagcctctcagttcagaaaagagatctctggacagagtggtcccaaggaggaggacaggaataatcacagcaaaactgccttgcagaaggagaaaacagaaagtagctcttctccctcagttttttttttctttcattgtgttcctgttattttgcttctctggaatgtcttttctcctcctctctacctattccagtctaacacttccctgaggccctcttcagcaaatccacagattcagtctctgggattccaatcttcactcatcttacttcctacaaactcttaccattcacctggcatgtgatttcatctgcgtatttgaatctgtatgaaaaaagattaatcttttctcctcagtttataatcggtaaattctttttggcaggtgtcaaatcttttttatctttttttagagacagggtctcactctgtggcccaggctggaatacagtggcatcatcacagctcactgcagcctcaactcccaggctcaagcaatcctcccgcctcagcctgcgagtagctgggactacaggtgtgtgccaccacacatggctaatatttaaaactgttgtggagacagggtctcgaacaagagaccagctcaatcgatccatccaccttggcctcctaacgtgcgtggattaaaggcttgagacaccatgcctggcgcagataccaaatcttaaaaaagttctgtgttccccagagtttctagcagtgctcagttgctggccactggctctgtgggtgcgcagtggcattgattagtaggtagtatacgagtaggctgctggtggtgcgtgaaaatctcggttaggattgtggaagaagactgaattctgggtaatcccagggatatgctgcatatcagcacatccaggctacaaaacacatgctctgagcagtttctgattctgaagttccccttcccttcttagttctgattgttaaagcagatgcagagttccgaaaagttgtaaattgagtaaaaaattaatttactgagaatgaaagtgtatcagcagttccactcacatattttaaaatgtctaagaaagaaaagaaaaataaaggaagaaggaaaggagggaagggagggaggaagagtgagagggatggagggagggaggggagaaggaaaaggggtaaaaaagaaagcctgggggctagggtgggaaacacacaagactcagtcttcaaatactatcagcaatttcataatatggtaatttttaatattaaaagtaaattgtaaatgtgtctttataaacaatatgcataaaatagatcatattctaaaaccttttctttttaaaatgctttttcacagtaaatttcttaggtgtcagattttccctcagaatagtgcaactggaagaagggaaatgttggcagtggctcaggactctctgctagtacaagtccttgtagatctcctgcaggagcgggtgaagactcatgtctgtctccgtcttcttgatcacctgcagtagctgcacgtgttccgtgacaatctgtctgaggtctgtcattttctggagcagcttggcaaacagctgtgaggactcagggtggttcagcttcagctggagctccagggcttgtagcaggttgtcttgaatgtcttcaatgggcttcacattcagcaaacctgggcggtctggggaagcacatatggaaaacacaacagggggttcagtcaaaaaatcctctgggccccgccttggaggcctaggcagctctaccaagcaactcatctgtatttttggtttgttttgctttgtatcttaaataggtggggaggaagggtaagcagataatgggtaagaactaaggatggaatcagaaccaaaatgatcagagctctttgcagggcctttttctggccaggatgtaatctgtgtggtcagctgagggagcatggcatcaaaacaatcctgttccccaaatgaagtttcctctgctaacgtgtttctactcagaaatctccttttcttttcttttctttttttttttttttgagatggagtcttgctctgtcatccaggctggagtgcagtggcatgacgtcggctcactacaacctatgcctcccgggatcaagctattctcctgcctcagcctcctgagtagctgggatgataggtgctcaccaccacgcctttctaatttttgtatttttagtagagatagggtttcaccatgttggccaggcttgtctcaaactcctgacctcaagtgatccacccgccttggcctcccaaagtgctgggattacaggcatgagccactgtgcccagccagaaatctccttttcaacttctgctccttcctgatgaatctacgttttatagcttctactcagtttcttatcatagcttcaaatatgcttttttcacaaatatgcttttaaaaaaaggtttgtctttttgcttaatttgcttatgctatgtttgcttaatatggcatatttccaaaggacaaaacacagttttaaaatactgatacattttaacagaggtttcttttcagtggtaagattgcaagcaattttcactagttcttctttagatttttctttagttcaatttgcaaatggtgaacttaaattacttttaagcagtttacttttttctttatgtagatcttgttagatttattctcaaatactttatagcttctattgtgaatggacccttcattttcattacatctaatatatccccactgatgtgcagaaaactaattgattttagtatattgaaacaattccaattttctgaacttttatcagttcaaatagcttttaatcatggatttctactttttttggatagataattatatcagcaatggtagctttatttatttcttcttttgcagcattaacctttctcatttcctcttcttgccatagtgtgttggctaaaacctccaatatgggattaaataatagtagcaatagtagcaattcttgttttattcctaactttgaaggaaatgcttctaatggtttatcagcaactatgatgtttgctatagattatggagaacatgttttactcctggctttccaggggttttacaattttaatttgttttagtcaggaatgttgttgaatttttatcaaatacttttacatttttctatctaaagagctatgatatctgaagagttatggttttatcttaacctagcacagtgaattacattaatagagttccttatactcttgtactcacttgctaatattttatatagagtttttgtatttgtaggtgatactggtttagagttattttgggggccattctttgcctgttttagtaacaatgttaactagccttatacaccaagttgagaggtttgccttctgtgtcaacgcagtaatgatctgttccctgacggtttcttagaatttgtttgcagaaccatctgagcttggtgataaatctatcactatctttaatttttcttccatagcttttatctattcaggctttctactacttatatggtaaagttttagtaatttatattggaataaagttgtagatgatattgtcttagaatatgaaatgtattatttttattcacgctccttaacttaacgcttttttttttgtgacagagtcttaatctgttgcccagtgcagtggcatgatcatggctcactgcagcctccaactcctgggttcaggtgatcctcctgctttagcctcccaagtagctgggactataggcatgagccgccacacccaactaatttcgaaattttttgtagaggtggggtcttgctacgtagcccaggctggtcttaaactcctggcctcaaccaatcctcctgcctcagcctcccaaagtgctgggaatataggcatgagtcaccatgcccagctcttagagctctttatttgtgcattctctcattaaaaaaatctgatttgtcaaaggtttatctattttttgcttttttaaaaaagacatagcttttggttttattaatcaagtctgtttttaaaaattgtgtgttttgtttttaatttattgaattcctttttaaaactttctttaggtttactttcttctctttttctagttttcttgagttgaatgcttaattcatttgatttggtattctttgtattctaataaatgcattgaagcctccacattttcttcttagtgccactttggtttcatcccatgggctttgataaacggtactctcatagttcttttctaaacagcttgtcttacaattttgatttcatttttaacctaagagttatatagaagcatgtttttaaatttccaagtaaaaagtttgggtttcagtttttgttttctaatctctaagttttattttctaatttctcagtttgttgccttgggttagattataaggttttctcagtcaggctcatcaagaagacagaacattcacttgatcatctatctcgtattgatttcaaatttgagctcctgaaggctatttattttcttttaaaaactgtaactcttctctccttcatggtatgagttttacccacctttaatgtccttcatgacctggtcctggtcatcctctagtctcagttctgtttcattttgctccatgttaagccatattaatctatttccataccaagttcctcaaacaccctatgttctgtcaggactctgcacttattcagattttattcttcctgcctgaaacattctcaccttcccttcactcttcttattgacttcaaccatttcttcaaaatacagcctgtggtgggattccatcctgaaatccttcctcaacagtatcccttcctctctcctgttcatctcatctcctttctctgggccctcatagcaccctataaacacctcaatcgctactatactagtagattacattcactgaatggttattattttccaaagatcgtgccaagggccttatatacgatatgccatttaatcttcacaataaccccatgaggtcatactttacagagggagaaattaagacttagagaaaagagttgcatcttaccaagatagaccacttgctagtaaatgcagagctgacatttggatctaagtctgtctggttccaaaggctctgctcttattccttattatcttgtattgtaagttctgactttcttgtttctcccccgttagaccgtgaggtatcagagggcagagactacgttctgaaccaccagtggaaacacaggaagcatttggttgactgagttaatgagcgagaaggctgttctggccaagagccctggatcaaaaagcacaattctcctggctggtgaacaggcctgaaggcagaatccctacacaatgaagaagtctgtaaacgatgttttcctgtgtctaataaactctagtgacctttatccattgagataaggctcaagagaacaatgtgagatggcagagtggtctcagagtgggattttcagaactctaaatattcttctaagttaactttcttacttttcttccattaaagaaggaaactggtcttcagtttgattttttcactctcaggtctccaacatatcccattgaccagagtaagtataattttctttttagatttcagcattcaattttggaaccatcagcaaaagatctcagattctgagaaggaacaaatgatctggtcctggcctggagaattgggcccctgggagcatggggtcttcctcgcagttgctctatgggaatgaaaaagccactgatgcttcattgaaggctgggccccagactggcaccttggtttaatgactacagatcctcctgcttgatgaatgtgtgcatctcaaaggccagaggcagacgtgcatctaaagacaggtgccgagagaggccctcctgggctgggaccactcagcctgggctaggcctctgcttactagacactggctcccggagcctttctgcagctcctccttcctccacctgcttctttttttttttttttttttttggtagagacagaatctctacattttccaggctgctcttgaatgctgggctcaagagatttgccctcctcagcccctcaaagtgctgggatgacaagcgggagccaccgctcccagcctcctccttcctcttgagcagcaccactggggtcagcccttgggctgaggagatgatgttaatctactaggtcccgtttatcatacaaacaaggactaacatgcaactgatcagggcttgctggaaacacttggctccggtgcagtgtcatggaactggcctctctaggagtggagagggatctggtttggattttcaaacccctctttggcaagttattctttatgatgtgatggatgaagcttggctgaagggctgaaattttgtggccacggagtaagtatattttctgcaatgacaagttagatcatttacagatcagtcccattgtccccctgactgagcctccgttaaggcaagatggtttagggaaggagggcagcagagaaaagttgcatattctacatctaaagctttcactcaccagctctgtgaccttgggcaaactgattaagatcaatgggctcaattttcttgtctaaacaaaacagaccggactaaatagataatctcaaagattctaattcaaaaattgtaagatgtattctcatttgtaattccctctacataattcaactggggaaatatactcaaacatctaattgaaaaagcatattaacattaaacttagaacacctgacttacttaaaaacaagaacgcttcctttggtctttaagctctagtcaagggcaaaatggatctgccagggttgttccctaccctccaccctccaactggtcaccagctccccactagtctctttcccctttctgctccacgcacactcagtcctttactgagctaagccaggtgccacagttgtgccacagaaatccatccaaatacccagacagtgccagggcctttctcttctctctccattcccaacagcctagtgcctgaaaaggcactgttgccaggaggcccacctgagatcctctccctgcaccttgctgaggttacagttgagtctggagtagggccagggccaagggtcctctctgctggggtaggctgcttagaaggcccttttgggaagtgtgtgtgactcagactccaggacttagcactcgaggaggctggagtcaattactagttccctactccccaggctgtgaagaattgggaaagaaacctttccggtctccatccacacggtcctggaattgattacagagcactgtggattatgggcaaatctacaaagcttccatctcgtccagatctggtactgttaagtggagggtttatctgaagcagattcaaacgttctggtcctcttgagatctgcccacctgggctgggtgtttccctagcacagattttctcaggaggtgtctcaattagggaaccagatgaccacagtggagtctcctgaagaagaggcagaaaaaatgcaggtggttttgtctctattctaggagctgctctcctggctttctgcatctttccctattggctctctgatagagactaatctgaaaccgactgtccctagggcgttcaaaaccaaaacaaacaaacaaacaaaacaaatgtgattgcagggcagctgtaaattgatccacagacaatgaaagaccttagttcaggtgtgggctgaaaactggaggggaggcagggctacttagggaacccagtactttgcaatttaagttccttttgcgcttcctctcaagtttcctttattgcactgctccctcagttcacaggcatgttctaggaggcagtggattgggaaactgaagacttgagtcctgtttctcttccacttagtttctgtgtgcctgtggacaaatcatctaatctttctgggtttaggcttagttttcaagacaatgacatttctttcataagcgtatggtgagaatgaaataggtagaggaactttagaacatattataattcttgtgtttgttcgaataaaggcagtttccatggggttggggtcaggagtgtaagtaggagtgggtggcatatcaacagttatgaaattgaaggtttttgagttgttcttggttagagcagaaattcaggagctcaagaaaaataatgcctgatgcagacacgtttggggtttcaggcaagttctcgttcctgtagttgagtgcacataggcaaggtggtttaagaacaataacaaaacaaaaaacccacggtgccccaattcactacttccttgaagaaatgatgctgggaatttgagggtacttttctgatccaattcagcaaagtatcatggtgtggcctatagcaattccttcccaccatcctaccgataggaaaaaattattcagcaaagttatacatgtgtcctcttaatatttaaatttgaatcggagcttggtctagtgcagggattatcaattttggctacatattaaaattatctggggagactaaaaaagcaaacgaatgcctgggacccatccctagagattctgattcacttgcctggggtatgaccttcaggatttttaatagctcttgggtgattctaatgtgtggccaagggtgcacactgccagctgagtgagacgcagttggaattacaactttgcaagctaggtaaccttgggcaagttccttaacctttctatacttcagtttcctcactttaacaattggagctgtagcggtaatttaactcatagtgttggtcagaggactgagggacatacggaaagtgcttagcacagtgtctgttgtacagtaaattagctattactattttcattactgctctgtaaacttgcctcattttcttcttacctttcttttcctctcatttctctgattttcttgggtcctttctacatttttcctattctttcttcctcaattattgctcccttcagcctttttcttttcccttcagccttccccctccctgccccccgctgctttccggatgttttcccctttccactcctgggcctgcatcttgctggggatttataagaacgctagcagggccagcttaaattaatcagaggtctgagccatggatgatttgaggagcaatgtcgtttactgctgctgctttcagggaaaggggatgacataaaatagagatcttgcaaatgctttgacaaacagataaagatcatctgtaaccagcacattctgcagtgaacacacatgttgctggtagagccttcgctctgaagtgggttaacattctgacacttgccggtttaaataacagtttcacatttaattgcttcccctatctatgcctgataacaataatatatatgactgggccaggatggtggagcgggataaccataataaaaatcaaaccagccaatgttttctttgatctgcccattaaatagcgattacatctcaacttgcctcatctcaacactccactcccacctccaatatgcaactcccaaaccacaaaacagtgcaagcccatctggtgacagggtgggcaaccctttcctgtgtgccatgttcaaagcccctccactcaacagcaccaccagtggaaactgagcatgggctctgtcatttctgggtctctcagagtgaaaatggaacccgagatttctgtccgaccccggaaagcccttgggtccctacctctgtgcaccctggggttagaggccccctgtcgttctagtcattccaggtcactcaatttacgtccagccatgcggtttgctccccacctttttgtcaggaccaggggagccatctgcagtccccccttaagcctagtgatgtacgtacatttctgctccttctctgtccaagaaggaatctgactggggctggaaatgcagggtgggaggtagaggaagaagggtggtgctgaaataggaagaacgatcccttccaagtctaccactaacctgccatctccatgccctgaatccgtctggtggctctaccctgcgatgctctgggcaggataaggggagggaaaggaagagataagggaataccaagaactcctacccttccttactccctcaacttctggaaatggcaacagcacatgaagggcagtaagtgaagttaaaagctgccaggtatgacttctctccactccactcccccgctgtcctccttcccaatgtctctcagaaaaacctgtgatctcaaaacacatgcacgctctctaaatatggtctaaacacatgaagtccccaagaagttcatgggaattcctgaaggctgggaatccagcagacctgccattccccgtctccttcgggggccacaggacgtccgaatcctccccacttccaagccctccccttcctccaggatctctttccttctgggttttgttctcaatccacacctaatccccttaaagcgatagttgataaagcgattagctgatatcccctaggggtatttatattgtaataagcgatcttaagaatgactgttggtggcatttccagcaatgtgactggcaggattgagtggcgctgcttcaaatcatatcatatagggcaaaagggaaaattagcatttattgtgtgctgaacatgtcccaggcattgtgccagaggcttcacatcatgttatttggtttgctcagggtcctgataaggaaattaaggctcagagagataaataattgccgcaagcacacatctaggaagagagagagtggggatttggaactcctgtccctctgattccagggctttgcaatgggccagcctgcctcttctggtctacctacttgtgacgctggtgagccctccgaagatttctccaggactgagtgatgccttcactacctctgctaggagtgatttgaaccagtgctgggttttcattcttcctcacttgcagatgatctgtctgaacgtcttggtgaactgtgccagtctggaaggctgcctggggtcactcagagtttaaacacacattgtgagagcccaaaatgataaagtgctccagaaagcagcccactgactgatcgactgagcctcttccaggactgctggtgtggggacaggaatgactcagcattcgaccccatagtcagtctctgagggcaaatccaattgcttgctcgctcactgggatgatcccaacctaccatgcctgggctggggaagggattttatttctcaaccagtcacagataaagatgcttctatattttacaaacaacaaaagcctgtatatgtatatgtttaaagtatatcagatgattctaggatgtttcatctcctccccatcattctatccccgcccccagctctgtggtttttaaaaattgggtgccagttgagaactcataaataaacctcacccttgtcaaaccaagtctatggggttatgaaaatagtgaactaatgggacatttctagataactcaaagcgagtcattattcaaagccattttaccaactagctgtgggggcatggtgagaggagtggcctaagagaggagcctcagaagctaggcagaaacaacataggtgcctgtaaaatttcttccagttaataaataagtgctattactctcagacacaatcgtagcccagataggggacaggaactatgcaataatactctttggctgttgtcctgctcaagagaaagcagatatccttgtttatttgcaatattacaagaaaagagagaaaaacaactttcaccatgtaggcaccagcctgtcttgtccaaaaaccctctacggatgagggaggtaaatatttagctggtacaggagaggtgggagaaagcgggctgattgttgttcacagtatttttaatatctatgttttgtaatattttgggtttggtctcctctccagttaactagtaatgtagatgctagcagatgaagagggggtggaaggcactgggctgtgcagaagcagaggctccataagccggagtttcctccaggaaagcactggcctattcaagcaagtacatcctgtcttttgttccagagagaagacgaccctttccattttagagctgggaacagtctcaagagtttgaagggcagctatgggacagggaagagagatgaatactcccaaacccggtgctcctcaaactcagtgctgattgaacactggtgttctgtgagctggaatgagtgttctgccgtgacagctgcatcagggttattctgtttgtttctgaagggcaggaagaaatgaagggactggatggtatttcgacaatttaacattcctctcataaatgtttctgcaaccacttatctatattagaacctagtataagatggtatctgattaagcagagatgtgtttacttagttatttaaagttgactgtccatttttgtggggagttctgcaaacagtatcattatttccaggtacctgctggctgaacaaattaaagaaccagaacactagtctttagctctatcaccaggccctactccctcctcaagcaattgtcaaaacctagggtgttaattttgttagacagattaaaatggtgtcttaaggagggctttggatattaatacgtaatatctgaactataatctggagattcttttttctttttcttttcttttttttttttgagacaggatctcactctgttgcccaggctggagtgcagtggcacaatcacagctcactggagcctcaaattcctgggcttaagcaatcctcctgcctcagcctccagagtagcttggactacacatgcatgcgccaccacacctggctaatttttgtattttttgtagagacgaagcctccctatgttgcccaggctggtctcaaacttctgggctcaagggatcttccaactttggtttcccaaaatgttgggattacagatataagccactgtgcctggccttggaaattcttaattacaatatctggaggcaatatggaaataggcagtttttgataaccgccaaagaactccaagactgaagcaattaattgagatgcttccacatctcaatacgcaaaaagtagagtctaatggttaagtgcaccagttttaaagtctgagagacctgggtctgaaccttgacctcaccgattagtagctctgtgaccttcggcaaactgcttaacctctttaaatttccattttctccatctataaaatggaggtaatgaaagaccatgtatgcagccatgtagtcttcctaccaagaaatccaaacagattatgggtgtatataaagtgcccaggacagattctcccacatactgaagctttcaacgaatggtaggcagtattataatcatttcggatgattattcactcaacaagcatttattgaataacttattctgggctagcactaggctttgattctactttaattccaacaaatttttaaaaaatctatctatctggtatgacccatgggggagccccagggaccccaggttactgacctgatagaactaggtgttatccaattaacataaaatatctgctcctctttgatctataaatgcatagcaatgagaacaattcccctgcttctaccctattctccttgcccactcaacagcagaaaagtctatgatcatgccaagaatagccatccaaagtggcttcacagagaaggaacagtgctgggactgctggaaaaagaaggagctgcccttgaggtggtttgcgtcaccaagccagactcaggagggcacaggaggaggctggatgacttgccatctgcagccgttgtagtgatatcggcagcttctctgtcattaggacggcgatggcaatttgccttgaaaaatatattgtaaaatccagtgaatttcctcccccgtatcttggaggtttaggaagaactgaaatggattccaaactgttttgaattaacaaaaagagcttttgcctgctgcagagttccagctggaactctcctacactttttcttcacaaaacagcaaacactcaagggggcaaaacatccaccagagtgtcctggggcttgtcagcttcactgagctttacgcttggctttggctgctgggtaggttttgggagtttgctagggtggctggcatgatgctgcggcgccagttgcaaacatggctttgctggaggcagttttattactcttgacaccgcccagcctgtcagtaagactagggagtgcaagggaagttattgtttaccatgatgaccaaggaagcgctgttcctggcttctaggtatgggcctaccttagggatatagtgaatagagaacaggttgcagccaccaacacaagagtgagtgtgctgaccacagtccactggccagggccagaggggacagttaggacacccaggtttcagtgttagttccacggtggcactagtttgtcagatctcagacaaatcacttaagtttacgaccctcacttttctttctgtgaaatgagaattaaaagcccaggagcgctgtcaggatggaatgagagaatgaacatgaaatgcccttaaaaaggtaccaagtcctgaactttggttctagaataggttgctgttcctttcatttagtctaattcttgcccccaagctcaggggagaaagagagagaggagaaagactcgagaagaactaggtcatctttctcagcagcttggtttgagagctgagtgaacagcagagacgctaagcccaggcaaatctaagtaccaatcaaatggtatcagcagtttttaaggctgaagttcaatggcagcaatcttaggtagcaactccagtttccccagcaaatactgagttgggtcaaatcagttactttcatctaaaaatctcctctttgggtcctctagggacacccccattaatccccaattccttacccccgcccactcttagatgacgcacatcttgctcatctttcttttagtctggggccctaagagcctttgctgaagtgaagttcttctgtgaatccacagccagctcagaatgaggccaactggatccccaacaaaagcacttctttctgaaaccaccaaagtaactgatagactttcgaataaattgcagaggagaaaacaatcactcttgttaagactgggtaggatcagaaatttgtttagtggatgaaagcctcctgcttagctgaatggaaaatctggaataggaggaaaaactaattgagaaattttgtcttactctaaggaagcacaatcggggaggtggatctcatcctcgatagatgcctgagattcagatctcacttcataaagcccagaattctcatgactgtttcttgtctagaccttgcctagtagaaactaagtacctttgaatggctcatttcaaatgcttcccttcgtatatgtgggtaggaatacaaactgctatgaacgtacacatatgtgtatgtatgtatctatctacatgagtgtgcatgtaaacttcttgataggaaaaataggactttgttaattctattttatcctgagggcaaagccctttacttttcacttatacctttctgtactctcaattataaaatgaccatgtaatacttttatttaaaaagttaacaaaaactattaacaaagagtatgtaatgacatgggaaattgactaagtgaaaagaatagacatgggatatatagtatgcttaggaaaaatatttgaaataaattaaatattaatatattttcaaattttattaaaaataaaatgtgccttaaaatagtagataaatagtctgggtgcagtggctcatgcctgtaatcccagcactttgtgaggctgaggcaggtggatcatgaggtcaggagtttgagaccagactggccaacattgtgaaaccctgtctctagtaaaaatgcaaaaattagctgggtgtagtggtacattcctgtaatcccagctactagggaggctgaggcaggagagtcacttgaacccgggaggcggaaaacccggttgtagtgagccgagatcgcaccactgcaagacagaacgagactccatctcaaaaaataaaataaaataaaatgaagtaaaataaaatactagataaataatatcaactgtttttctaatctggtttttcaaaatttaatatttttcttctggcaaacctcttatatactggaatctcatccttttttgctgaattaatcaaagataccagacagccagggattaatttaggaagtaaatttggtcaagatattaaaccatgccaggtagtatatttttgttctattaaacataacgtcggccgggcatggtggctcatgcttataatcccagcactttgggaggccgaggcaggcggatcacctgaggtcaggagttcgagaccagcctgaccaatatgatgaaaccccgtctctactaaaaatacaaaaattagccgagtgtggtggcatgtgcctgtaatcccagctactcgggaggctgagacaggagaatcccttgaacccgggaggtggagattgcagtgagccgagattgtgccattgcactccagcctgggcaacaagagtgagacttcgcctcaaaaacaaaaaaacaaaaaacaaacaacaacaacaacaaaaacccacaatatcaagtagttattttaaagtgaatcacgacttgaccctggacttcacagctccaaaggtaaactatgccatactgtgatctatttgcaccctaggcatttaaaggccggtattccgcatgatgtgatggtagagagtgtagagtctgagccagcatgcctggctcacaatcctgtctccatcttttgctagccacgtaaccttgcgcaaatgagaaaacctctcagtgctttggtttcctcatttgtaaaatggtccttacttccctgaattgttgtgaggattgaataaatatgcatgaagtgcttagaacactgcctggcacacagcaagtattaaataaatgtttgctattcttatgactactgcactatgcacctgatttcagaaacattctcctttcaactggacaacaaaagatgacaaagggatcgtgctctttataatacattgtgcagttatatacagtttaccactatcccccgacgggtttttcacagaggatacactgtagagtacatacaaaaagctcacctaaagtccacttcaataggaaaacttgccacttaaaaacaatttttatacagagagatgaaagtaaaactttcttctactcatgagaggctaatgaaagtaatgtttagattgtgcgtggtggcttatgcctataatcccagcgctttgggagaccaaggtgagaagattgcttgaggtcaggaatctgagatcagcctgggcaacataatgagacctcatctctacaaaaaaatttttaaaattagcagggcatgttggtgtgcagctgttgtcctgtctacttgggaggctgaggtgggagaatcacttgagcccaactgtaaaatggccacgtattacttttatgaagtagcatgatcatagcttactaactgcagttagaagctgcagtgagctatgactgtgcaactgcacttcagtctgggtgacagagtgaggccctgtctcacaaaaaaaaaaaaaaaaaaaaaaaggaaaaaaaaaaaagaaaaaaaaaagaaaaaagtcacactcagaagaaaatctggcttttggaattggttagtcagatcatgtactacttgcagggccaaaaatacaacaaattgctaaataactaaatttatttctatgttgtgtgttcggttcacattgcattcttaatcacaaccaactacctcacaaaggtactttaagggaagccatcagaggaatccacacaagagagtgggtggaggtcagtaggtattccttaattcctgatatcacaaaagcaattcaaagtagtatcttactgatggtggggcaggagcatgatttgaccagaaatacttagtggtcccttctctacatcaagtgagcattgtcttaagcaaagttatacatgccattacttacaggaaccaaagattagactggcctctaatcttcctttctggaaggaaaagaaagagacaaagaaaagaaaagaaaaagaaaaaggagaagagggcatttgactggaaaaaatatattgttgagggatgaaagagaagatcctgggttacttataaccttcacaccgcaaacctatgacactctttcttggtacagtgttttgcacgtgtagtgatgattcatggcatcatgccactggcacttaaagtgacaatgcagactaacactaaggaaatccaaaattcttttggccaccccaccatcatcccaccctctttcatagaagatcaaaagacaaatcttacctccactgagaataatgacagcaataaatattgccaagtcgctgtcatctaattccagtgcattgaacttcacagcaaactcaaacttgggctccataaagtcaccaaaaggctttcgcaggctctttagaaactcccttgtcatgaagccttggccctcggatatgagaaccccatctttattcatcaaggaggccagcattgtgtaaatgatctcgtggactccatatttgaggagagttacttggtcgttcaagtcaagatttacaaaaccaggaatgcttttggcatactctgtgatctcctgcacagcctccacggagcgaaactggcagccctgaaagatgcggatggccacctctttgctctgctcctgcaggggggtgatgtgtttgaacttgattttatcttctcccatcattaaggaattcatgtcatagataacgaatggctgcaaataaaacagggaaaacgtggatgacttggagatttctaactcacagtgaatgccatcccaggttcagaaaactgtttatgtaaacttgctttgctaactaaaatctttaaagctgaagatgcttaataatgagaaaatactctcaagttcttttattcatcttaattatcttctgggaccaaacatatttcaccaattttggtcttctttcccttcaatttacactgtaacactttacctatgactggctaagaatcctgatttcttttgtttggggagtcttcattgttgatttttatattatttgtttgtttgtttttgagacagagtctcactctgcgcccagactgaattacagtggcacaatcagggctcactgcaacctccacctcccaggttcaagcaattcttgtgcctcagcctcctgggtagctgggattactggcatgcactgccacacccagctgatttttgtatttttagtagagatggggtttcaccatgttggccaggctggtcttgaactcctggcctcaagtgatctgcctgccttggcctcccaaagggctgggattacaggcatgagccaccacacccggccgattgttgatttttaaaatgatacaaaatctactgtttatcttggctttcaatgaaatacacttttaaccttctttcaataaaaaaccatttcagcaactcagcgttgaaaatacccacttgaacataaagtaactacaggtttaaaaaaatttttttttcttaaaatttctttttccttttcctttgttctccttcacaggtaataacttttccgttttagatgaaatcctctcagatctcaaatgaaactatgtgcacataaaatatgcttaactatgaaaaatcactcggaaagcagattacagctcttgaaccaagaaaatgtctatttctttttttaatgctctggaagccatctatttcacaaagagcagatatagaaggcctacaggtgaatgctgcaaaaaagcaattttgaatttatattttaaaatatctgtccttataggtcaaacaatcaataaaatacatgccccaattattcaagtttgcaataggctgccttcaaaagttaagtcatttggtcatgacattctctctcttttacttcccttgtatagaactaagcaaggtttgtagtcattgagaaattctcaaggctgttctgactaaggggtaacattttacttacactggatacactgaatgacacataaggagttaaaccttgaatcctgttcaaatacttgtatacctgaaagcactggaagaagagctgagggtatgtgtgttccagctttggttctgtggtgagccatgtgacttaagaaaagtcatttacctttcctaggccttaaatttctcaatcaggggtttccatctcttctccggaggaaattctagttgcatttctcagaagcaggatgtgtgtggggagtgggcatatgtgtggagaggtgtgagtgtgcatgcacgacaaacatgaagtctctgatggactaaaagtaaagattgttttgagcagagatgctgacaattctctcctgaaaggagagaaggtgcatgagtggccgtggcagccggcttcaagatgcactggttggagattctattcatatctatggaactctatgattttcatcaaaagattaagtttgttctaaactggaggaaataacaccaacattgaggagtctcagatattaaatatatttccaaacttgtacgtcacatcaacaccctttactggagttattctggaagtttttacttttgttaccaaaaaattcacttcaactgtactacttagcaaactccaaaagaggacagatgtgaggacccccaaacaggtttacttggtggctctaatttttaaggaaattgggaccaaactgtccttaccgtatttcttaaacattttgcttgggtggtttctttcctttttctttttttcttttcaggattaatattattaatgggaggaatacaaggggggcagagcaagtaacatcgatgaaaatttactgtatttttccagaacgtcaggttctaattatgagaaaaatgtgaatggataatgatgctttcacagaacctagagaaaacgtgtttcttgtcctccaggcattttacagtgtattataatttatattaatgaaatatttactttctttttctaaaaaaaaattatttcattttttgagatgaggtcttgctatgtatgttgcctgggctggtcttgaactcctgggctcaagtgatcgtcctgctttggcctccctaagtgcgtgctaggattacaggtgtgagccaccacaactagcctttattggctttctttcatgtcatgagaaaatgatgatctggacacctgaaaagaccaactgcacatgcaggagtacaaataacatgaatataaaatcatcaccttttcacatgtggaaagactgtacccagaactgcccacttcaactttcagagcttctgctcaaccatttggcttcttggcacagaacatatgcatgaaattctttcacctccatgtaagtgatttatctggaactatgccctgataaatcacccttgtcactcttcccctttacttcccctgtcccctcatataaagctccaggttcctgtttttgaaactctgtaatagttgaacatagggcacaaaatcctgctaattttctctcccaatttaacaacaatgtgactttaaccccttggcaattgatgttggtcaggatttcctggcagtaaatactcaaggacagagagaggaatcagcaccccaccatcatgccaaaccatttcatttttttttttttttttttttgagatggagttttgctcctgttgcccaggctggagtgcaatggcgcaatctaggctcactgcaacctccacctcctgggttcaagtgattctcctcagcctccagagtagctgggattacaggcacccaccaccacgcccggcaattttttttaaatttttttattttttagtatagacggggtttcaccatgttggccaggctggtcttgaactcctggcctcaggtgatccacccacctctgcctcacaaagtgatgggattacaggcatgagccaccatgcccggccccattccagctttttcaatcctttctgcattctgaagaagaggtgaactagcagagaattctgggtgttgacatgcaaatgaacaccagttgttttattttttccctagtcatatctgattatactgttttcactgcatttccgaaggctgcatagattctttcagcctccaggtagatctgtcaaactgcaagagtgatccctgggtgggcctggtctgcctttctttgcaaccaattcaccaattcttagatagcagagagttcactttcatatttcacaggggacctccttaccctcaaacctagtgagaagatcgtggccagcctgctttatggagagagaacctcttaaaaccctggtcaaatttggtctgcattttatcttgaatcattaatttaacatgacatttggtacaatgtggtacaatgttccatacaaaatgtactgcacttccatggctgtttttttgtattttttacaaagcaaagtggagtccttacactttccatcagcttggacagtatcatccaaagattgccattataggagccgtatcattctcaaattttgtcttaatgattttacacttctagttgggggctaacagtgtatttatcttcagaccgtacatcaaagggctgggtaagcgtccctccttaacaggaaagaaagcttaattacaaatgggacatgatggggtgaattcaggttttgtggggcataaaatatacacagtagtggagtctctctaaggaaaatattacaaattatgagaataaaattgcttcggcccttccccaagcactggaaggacttctgcacaagggaagggccccatgaagcttcattagcttcatggtgaatctgtcactggtcattgtgtgcttgtgcttttcatatactggacagaccagaacggaatgaagaaagctgcacttgaacccagtgtttttccaggaaagcaaaatgatttctgtaaggagaaatcaattttttgagggatacatcaaatataattaattttgatatatttcaattttcaatattttgacattttgattttcaattttgacatattttgattttcaaaaatatattttgattttcaggatgggattaaaagtactgttttatatagatgagtaaattcaattatagatctatggcatgcttcctatgtagaatacaaagacaatgggggaaatgggattaatgatgaaaatagagtaattaattttttttttacctttttgaatggagaaatagaacagtagtgttcctgagaaatccaataacatcagcattttaacatgagttatgaaaggtattatacatgaatgccctaagtttacactccttttgaataacaaaatagcaagctacgggagataaacatgaaaatcactcaaaaagcacagggtattctgggtgacttttctaatttggcagattgaatgagtgtagtcaacccctctaccctctctcaaacaatcacttgaggtaaccctgtcagagtgaaaactggcttggaaaaatgtgtgcctcatcgagtgtggctttcctgatgttcttagttttaccagggaaagacactgaattcttagggctcatgttcttcattttgtttccttcttgctttttacacatctgactttcatcacctttgacacacctggttctcctcggttagctacaatccaaaactcattggtttggtttcctcagcctctcgttggtttctgcccctgttgttcccgtttccctcttgttgagaactatgagatttataggacataaggggtcttcagaagtaatctgtcccatcattctctgactaatggataaacggaagccagagacattccaaagtcaaagtgccatttatagcaaaccaggaactagaacctaagccccgattctgggttgagaacttttccctttccattgctttctataggacttccccacttctttttttccttttaaaatgattgttctaggatgaactggagattttaaactaacgctcttaacatgctggggtcttggggcagggccttttgaaccactgtttcctagaggtgctggtggagtgctgtgtgtgatagaagtgaagtttgaaagctgtcaaagatattctgctttcctgcagggtttagagatttacgacaaacaaatgaaaacttaatatgaagaattattcacatgctaatgaactagcacataaccacagctcttaaaaaaatcaattgccagccaaagagttactcagcaggcaaacaagggtattggccaactgagtccagccattggaaaaaaaaaatccaagtgcttttctttttaactctataaaatattatttttaacttattctctgaaagaacacactggtttagatcttttacatctttagctattcctgacagtcctggcaatagaagaatttattttattaatattgatacatggatgaatgatcccagaagcctaacttctccagcagccccagaaatgaattggcactactatcctgattttatttctactggggtccctaagcccctttctctgaggattctgcctgatgtctttcctttggggagcaaattccagctcagtcgggcttttccagagataaagggaaaagaacccatacgttgtttagctgtaagtgtaggatttaaaaggacagatatctttccaatagctttgagtcactgggtttgatggccattgtaaatttcagaatgcacaaacttaaatgggtaaggaaatgttttcatagaagtttacatttccatattgattttattcttcactagtttcatatttcacacactatttagaaagaccattttttccaatggcaccagtttgctcttataattataaatacagtgactccacatgtacctaccataaacaatgtgatgctttggaacccaaagtccaatatagcacaaataaaaagttttattccttatttgcagacagagtgcagccggagcttcgccatctcttagataggggtgaaaagttggcaggtacatcaagcgcttttctatttattgttttatgacaaaccatggcactgaaaatggtttttgaaaaccactgtttattttcatcaacaaacatgggatcatgtgacaatgatacgcccagtgtgatcatcgcaccagggtaatagtcaaacactgggcacttccaaagtccattcagttatcaaactgccttcatgaaacagagcacctagttctggcatatgcatggttttcagagcgcacaaagatctcttaaataaggggccttggctggagcaagccactgaaagggaaataggttgtggggacagtcagttccatcctattgagggcggttgaaaggtctactgctcctaaaatttcttgtccggcaatctatagctgacgattccatatcccatcttttcccagccctaagcctaaaattcccaagcatactcttatttaggcaaaacaatgaaaagtagggcatcatacaccaaggatatgatgttaaagttggtagaaggggagcaggggaatttaatttatccattttgaaaggtgcaagtggccctagggaataagatacaggagaaggaagattagttggggaggggaaggagtcctggtctgcctagaggcaaatgctgagcgggcagggcgcattctacaataggcaatggtgaaattgagcagtaagatacatttaaagaatggcctcttcaatcaagtcatttccttttccaaaggttctgggtaattggtcacccactattctgagtagcctcccccagccttggcctaaccaacactaatgacatcagtctcaagcagggtgtataagaaatgcaaattgctctgctgcacagccatagccacttttatatacctcccaccctctcaagagtccatatttctgcaaaacttttcctatcaatgcaaatcttaactttcatgagtcctggccaagagataacataatacccctgagatagatgctatcaaatgagtaacatgaccatgtagataaagaacaaatctctagtctcgttggaaatcacattttggtttttttttttcctttcccatattcctctctgaactgtttctttccactagtgcttaatttgattttgcaagataaggagaagagagggtgccaaacaattgtagtttagttttgtgtcatcagtgaatggattattttaatttggcccagtctctctttttccagaccctgcctgaatccagatcatcaatgatgtccagtttggtaagcaaatattgggctagaggccctctgttgaaagtccagaatttcaaagggcataggcaactgtgtttaattcaattaagcaaatatagtctgagtaactattaggggcaagacacagtcctagttactggaagaaaatgacaaacgcttggcctctgaacttgaaaagcccataatcaagcatttcgcagccctctcctttaaatagcttaatacctgtttattccataaagaacctccttattttttaactcaaagatttagagccaaggagtcaactggagtgaggtatcttgagggtgtcctccagtaacacagataagagcacgttgcacaccagtagtgtaattttaagttcttgaccaccgaggctttttttttatcagtcttttgcctgactttctggtactattaagttgacaggatttctaataaggattgcaggtatgaattagaggatgaaaagaaggtgagaaagcagttgatgaaaactaaccatggctggtggctcacacctgtaataccagctctttgggaggctgaggtgggaggacggcttgagccccgagttcaaggccagcctgaccaatataagaagacactcccacctgggcaacaaagcaagaccccacctcaaaaaaaaaaaaaaaaaaagaaaagaaaagaaaagaaaactaaccaaaactgtagatagtttgctttagggctctttccttttcagcaatccttttaattttttcttcctggatatgaatggcttattttctgtagtccaatcagctacgcagaggtcttcatttatttttgatttgctatggccaattttatcattgaacgaatgagctttataaacaccagtgttgtgcagtcctgtgcatgtaaaagccagcagtcctagtcaaggacttttgtaatttgaaaagaacagaacagcacaaaaattttccaattgtgaatatgttgggatagcagatgaggtgaagaattcctactgttctaaaaattgagaaaaaacaatcatggaaagttttctcagaccgaagctttcttagtgtattatgtctccctggcttactaccagcaagtgggaaagactagcttcctaaagtactatgctactgaggggctagcatgctacgaatgctctgaactagaggccagaaaacctgcattatagtcccaggtcttctacccacttgctgtggggtcttagggcaaaatgtttaacctctctggactttattttcctcatctctaaaataaagaggataataatagcagtagtcaggtgcatgtggctcgaacctaacaaatgtgcaaggttttttttatactgtaaagaattgaatccaggtatattattgttgaggtatcaaagacctattttcaaatcagaaaactcattgtccttattaccatatggctttatgccataagtttcctttttctattaactgattctactcttactagtttagctaaacagaagaactaccatcttgagatagtcatcaaaatacatgaaaggttaatgagattttcctaacaatatatctgaataggggaaaagttacacatatctatcaagtcattgcatagctctctgggaggtgttcatgtgaaaataaatgactgcatagaagggctttccatggctgggacggtgtcttctcagtgtgttctgcagttcttacagccctgggagcgttgtgcagacatcagaatcaaagccaaaccctgtcattaaaaactgagctacaaagccgggcgcggtggctcatgcctgtaatcccagcactttgggaggcagaggcgggcagatcacgaggtcaggagatcaagaccatcctggccaacatggtgaaaacccatctctactaaaaatacaaaaaaattagctgggcatggtggcatgcgcctgcaatcccagctactcgggaggctgacgcaggagaattgcttgaaccagggaggtggaggttgcagtgagccgagatcacgccactgcattccagcctggcaacagagcaagactctgtctcaaaacaacaacaacaacaacaacaacaaactgaggtacagagacatgatccaggtcatccaagctgatggcagaattgggactagaattcaggtacaattttattctataattccatgttgttttctcagtttccagtcagagaagagctctgctgcttggaaaacctaactcagtaacaattacaacccattctgggttttctaaacagtgctgctcaatgagtgaacagatgttggagagtccactgaagtagtccaggcagctcagagccttgcagaagataaaattcacatatgtaataaaaggatagagcttctagttgccccggaataatcaagaatgctacaaggaaagaaaggtaacataatatctagaatctatttttatgcctcatgttgaacttcttaagaggtaactctagaccagcctgatcaacaaggtgaaaccccgtctctactaaaaatacaaagattagccaggcatggtcgtgcacacctgtaatcccagctactcgggatgctgaggcatgataatcgctttaacctgggaggcggaggttgcggtgagccgagattgtgccactgcactccagcctgggcgacaaagtgagacgacatctcaaaaaaaaaaaaaaaaaaaaaaaaagaggtaactctggtagttctcctgaaaggtgaaatagtgggattcaataccttttctaaacctaggtcgggttcttcccagaggaaagcaaggctgcttgaatgaatattgctgtggccagttattttgatgccgagaaaggagatggatcctaaaagagggtgataggctcagggggcttaagttcattcattaaagttaggatgaccaatacattgttacactattctcaaaaactttatggacttttctcccttttcaaaataatgttgacttgtgctatctgaaaacacttcctgcgtttcagactcagcctgcaatatgttaacagccaacagttgaacaatattctgtgtgtgcatttgtagcgcagtaaaccatttactcaaagaaacaaaaacccaaaacaacttcccgcctcccccaatgaagacagcagaagagaactaactgatttgtctgttgtctttcctgtcaagatcgccctcgcctttgctttggtcagcgggaaggactttatgtatgagtcatacaaatgttttgccagggcccggaggtcagcggactctggattcagctggtcgatatcactggagatctccgccaacagcttctccttctcggcctgtggcatccgcccaaacctgatggctatagaggaagaggaatgacaggatgaatcattggattactactgctctgaacacacactgtgctctcccagccctcgttcccacacagtagaagccctcctcctccactgctcttgagtcctggtttctgtctaccactttgctcatgtttttatttcacaaaagtagcacagaccatcagtaaaaattaaaccgttaactttcatttttaaaagttaatgcatactcctgctgagaaagtgaaagaattcgagtttagcaaagggagggaagtatgtcgacttaaacgtgaaataattgagaaccaactcctactcatccctcaagacccaattcaaaggtcaccttctttgtatccccagcacttgacctaaggtcaggcactagaaggatcaacacgtttcacgaattaaaatacgaaactgtgcagaattcaaagttgtacagacataggctttgttctcagggagtttataagatttgtttgtctctgttaaaaagaaatatggatggtgctttatcacattttactagtccagagagcacttttacatgtagcggagagaagccatagttatctcccgactctccagagttaccacttaatgatgtttgtcagaaagacaaactggctgcctgtagggtgaggaagtgtcaaagaagataatgaaagaaagaaaagcaacaaggaaaatgtaagaggggttagtggggactagtttggggaaaaaataaactgtaacttttcaactcagatatgttttctttccttcttaccaatatgttcagcaaaatattattttgaatcatgttcctttgggaacacactttgggttctatgtttcccataataagggtacctggccatcatgtccactgttccccacgcatacatagctctgttcttacactcacgatgtggtatcacagccatgcgtttttatggtgatcggcttcactagactatatgctcctcgagcgcagagactgtcatatttgtttatgtctctagcaagactctgtctctgctgaatcccagaacaaagagatttttattttattttattttatattttgagatggagtcttgctctgtcgcccaggctggagtgcagtggcacaatcccagctcactgcaacctccacctcctgggttcaagcgattctcctgcctcagcctctgagtagctgggattacaaggggtgggccaccatgcctggctcagttttgtatttttagtagagacagggttttaccacgttgtccaggtgggtctcaaactcctgacctcaagtgattcacccacctcagcctcccaaagtgttggggttacaggcatgagccactgtgcccagccagagatagttattttacatgttattatgctaagggtagcatttctaccatgagacatgacagcacacgacaactttcccatctgagtactctgtgaatattaccttggattttcccaagaagaaactgacatgtacccttgagtctcaaattcataaattcatttccattgaccctaaataaattttatcgctgactaatacaactattgttttgtaggggcctccttagagaccagacttgggtgttagaggggaagaaaatcttacctctcagttgggattcctttaaattgaattagcctatatttagatacttttagtgaatatatccttggtacatggcctcttcatatagaaacctttaaactaggaggttttggtcaaaaatcctgttccctactcactcttccccattttctttctgtgttgttccatggggctggggtatggttgttcatatttttatctactggtgaccccagcccctggtgctaggcttgtctgggtccctcaggatatgaccttatctcacagcactgatcacaggaattaatctataatgttttctttcctcccttgccatataatctccacaaaggcaggaatcttgttcattattgtatcctcagcacttagtacaatttctggcacatattaagtccttgtctactgtattttgaaatacaatggaaagaaaaccccagatagcatattccttcaaaatcctctgtgacctcctgaccactttgctcagatagaattccttatgcagttggccctccatacccgcaggttccacatctgcagattcaaccaactgtggattgaaaatatttggaaaaaagaaccaataaaaaataatatgggctgggtgtggtagctcacacctgtaatcccagaactttgggaggccaaagtgaaaggattgcctgaggccaggaatttgagagcagcctgggcaacatagagagaccctgtctgtacaaaaataaaaataaaaataaatagctgggcgtggtggtgtgcgcctctaatcccagctactcaggaggctgaggtggaaggatcccttgagcccaggagtttgaggctgcagtgagtcgtgatagagccactacactttagcctgggtgacagcaagactctgtctctaaaataaataaataaaacaatgataaaaaataagacaaataaaaaaatacagtataacaacttttttttttttttttgagacagggtctcgttctgtcacccaggctggagtgcagtggcacaatcatggctcactgcagcctcgacctcctagactcaatcgattctcccacctcagcctcctgagtagctaggactacaggtgtgtgccaccacgcctggctaatttttaatttttttgtagagacagggtttcaccatgttgcccaggctggtctcgaactcctgggctcaagggatcctcctgcctccacctcccaaagagatgggattacaggcatgagccatgacacctggccataggaactatttatacagtatttatactgtattagatattataagccatctagagatgatctaaagtatacaggagggtatgtgtaggttacatgcaaatactatgccattttatatcagagacttgcacatttaggaattttggtatctgagtgggtcctggagccaatcccagggaataaggagggatggctgtactacattcatttcttgttcaccagtagttcctaattgaggagtgcggagggtaggggaggcagagcctatcagagtcactcggtaacttctgacattatatgtcttccacgggacattttgatgggccatccatccactcaattaggagtatataaaaaacctggggtttgggacagtttataaaaagcttcctaaatgctgggctcctgttgtatgcatacattagctcatgtattaaactgttactatactatgatgttggtttatatcagttattctactcgaatataaattatatgagtaacatgttttctcatctttgttcctaggtgtaacaaaatacacatagtaggttaacaataaatgtttgatggattaaactccaaagtatcaggtttaaaaacagacagaaaatgagacactatgtccattaggaagtttgggaaaatgatcatgagaaaagcactaagtaagaaggcgtattaaaagaagaaggcattctggtgtaaaactcagagaaaaccagttatcctataacaaaatagaggtgactagaatcaccaagtgtctgttgctcctgaacttttgttatttcacagaccacacaatactgtctctttattcaaggaataattgttgaatgactattgtgcaccaggcatggttctaagctctgattcagtttttacaggtaagaggctataatcatatgcaaaactttacacacctagaaaagcaattttttcctaatgggtaatcaaaaaagttaatttaaatggacaaacagccaaagatagccacttactacatttactagtcttgcttttctatcacctaacaaatataaccaaaaaataccccgaaaaaccattttagaattaggatatattaaagtgagatccctctgctataatctcactaaaacgtatttttgtaagttgaagttccccccaaaggctaactctaatgaataaattatctgtattgttaaatgcccatgctacaaattaggttccatttaactaccagtgcaaccaattatataggtgattttaacatttttatacaccagaagttcataaaaggaatgaaaaatcgatcccatttggtgagactaaattcccataaaacatacacaaatctgaaattgtacagaaaacaaggatttttatttgcctacttttttttttttttctgtctttcagctgaggcacgcataccttttttaagggggaaaaaagccagttttattatttcgttgcttttgagtcccacataattgtacctatctacctcacgtgaggtgatgagaggaggcacaggaagtgtttaacacagtgctaggtgcatggcaatgcttaacaaacacagcttttattgctgtggtcttggtaactatggctgctgtgggttctagaccaggctggtagtcatggcacgctgacctctcccacagagaaagaacagaatctgaaaccctaatctatgtgtccatctgtctgcctatctctatttctatctttccatctttaaattgtttgtgagatggtgttttttagttaagtaattcttgagcctcaggttctacccttcatgtggagaatctgacaaccaagaggaggaaagcgaaggaggttgggaggtgtttcctgaaagactgaagtcagaccttagaaatagaagatgaacattctgcattgggggtcagaactataaaggctgagtgtactcatatacaagtgtatttttccaaatcttctaccactgctgattaatcttaaaaggaaaatgcttcatgtcttactgtgagtcactgagcaagaacttttggcctctctggaaagcaagggaatgaatactgcactgaatgcagtcaggaagcttaatttctagtttcagctcagtgacaaactagctatgtggctttaagaaaattactgaacttctctggtcttcaactgatttatttactgaatgaggaacttagaaaagaagattctaaagtttccttcctctagctctaaatttagctctaaagttctacaaatgtctacatagtactcaagaaaatgctctgctctctttttaaaagcagtatttgtctagtttttgaggctcaaaaaaaattacattctgtctgttctacagatctggcacctgtcacacagagcaacttccagaacactggcacgcagtttcctatttggaataattcatcacctacagagaaatctggtatcttggtaaaaaaaattatccatatcagagctggtaggctcccttcaggaagactgggtttgatagagactcattaacttctgggaaagcatattggcattcctttatacaacacacttctattgagctgaatgtagctactactagcatgttatagatttgtattgtgtatttagtactgatattgctgaacacacaaacaccaagcacatggaatagttagatgtcctgctttttggatctgggtataacgctaagaaacaattaatcggcatgtttttaaaacatctacctaattgtagaagcattaaagacaaatgctacttaattactaaggttaattaaagcaggttttcaaaataataaatcaatagaaaataacagaatgaaataagacaagtcttatttttgtctttccacatctaagggatgaatttgcaatcattatcaggcttttgaaaaatagtaaggctatgtcttatggtcaatttttctactttttatatgtttgttgcatacaaacaagaacatgtgctattgccaataagttgttttcccatctctttttaaaattttttttttttttttagagacagggtctttctcgatcacgcaggtgggagtgtagtggcatgatcgtagctcactgcaaccttctgggctcaagcaatcattctgcctcagcctcccaagtggctgggcccacaggcacacatgaccatgcccagctaattttttttttttttttttttttggtagacatgggatctcgccaaaactcctggcccaagtgatcctcctgcctcagtctcccaaagtgctggaattgcaggtatgagccactacacctggctcacctctctttctttccttccttcttttcctcccttcctttttcctttttccctccctccctcccttccttccttccttcctcccttccatcctttctctttcttttctttctttctttcttttttttttaaagagacagggtctcattctcttgcctgggctggagcacagtagtgtgatcttggctcactgcagccttgaacacctgggttcaagggaagctcctacctcagcctcctgagtagctgggaccacaggcatgcaccaccacgcttggctcacttctctttcttgagggagaaaaaccaacttgtgcctgctggaggttctgcaggatttggcaatctaataactatccttttgtagttcctctaaaggaaaacaaggagcaactttagcactaatattaaattatttttatgcagaggtaccatttttcacactatttgtagaggacatttaaacattttcttaggtttctttcaaaaatgaagatgagcaaaacaccaccagctcaccttctaactcaatctctgattccctgaagtcttcctgacaacctttaattcattcactgaacacttcgttgatgcaacactgtgctgcacagatggggctgggggaaaggatggaaaggacatgtctggtaggggagactgggtatattacacagatgagtctttctctagtgtgcctctctgtactggctctggcctttctgcccaggttgaaggttctgactctactattacctcctctttaagctatctttcctccaccactgaacttactgaaagagttgttttcactccgtctgtgtttgtcactttctattcacttctcgatctactgcagtctagctttgcgctcactgggatttaccaaaactttgtaaaaatcctgaatgcttttctctcggccagaactaatggcctcttctaagttctcaatagacttgagctcttcagtattctcccagcctttaattctggtgaccatctccgccctcttatttccaaaatttcttgtcctggttcctgctgttctgggtcctctaacattctgccagctgctctccagatctctctgatggtgcctctcccttagcttgtattctgtggtccctagtgtgacctctctaacctacaatgggtgctgatgattcctgctctctcttcactgaaatttggagccttatttttcacatcctcctatattcctctatacgtagttgctggatactctataggcatctctaacacaatataaaactgaatttaaaattttctcctccaaactggctcttattcctgtgttcctctcttggttaattcattctatcacccaaattagatatcctaaataatctttgacaacttctctcccttcaggcgcttttattcattggtcactgctctgatatttctctcaatttcctttcttctcacccttctcaatgtcttatttcctaatattgcattggtcttcagatggatttcccaattccagtcttttctctatcatttttactgctatcggtatttttttttttttggtaatatgtatctgatcactctcttgctttttaaggcagaatgtgatatcacaggaaggtatgaaacacatagaaaaggaagagcagggaatcagaaaagtctcatgggaaggaaggcatttgaatgcagccttgaatgtcaggaagaatttccacaaggaacagacagacgcatcaacagaggcccagaggtatccaagcataagccattttccaggaacagcaaaatgcagggtttgcctgaggtgtgagtggaaagtgggcaggggtggggaaaggaggtgggctccaacatgggcggttctggagtccacgcagggtagagggacagggcagctggagcaaacatgtactgccacatgcattaggagtttgttaccttttctgaaagttaagatttgggtaatttttctttacacaaccaagaagactaaagaaaaaaaaggaataggttagccagacgcggtggctcacgcctgtaatcccagcactttgagaggctgaggtgggcagatcatgaggtcaggagatcgcgaccatcctggctaacacggtgaaaccccgtctctactaaaaatacaaaaaattagccgggcatggtggcaggcgcctgtagtcccagctactcaggagggtgaggcaggagaatggtgtgaatccgggaggtggagcttgcagtgagcctagatcgcgccactgcactccagcctgggcaacagagcgagactttgtctcaataataataataataataataataataataataataataataataaaaaggaataggttaaagttgaaatctagtatttgccattcagaatttttccttttctcaatatacactagagctgctgtttgcaaggcactgagagaactaccttaaaaatgttgagtgtcacaaaaatttgtgaaatctttttttctggatttttatgaagccactgagaaactattttgaaagttgtcagttttttttaaaaaattacaaactctctctcatttatataataagacatcctagtcagcaaagctaagatttcaatagtttttaaatttatgaaaaacatatttttaaccaaatctcaatgttatagagaaaacctaactgaatgattcataaataacatgtcaattcttctctagattattttcttaaataggtcaggtgcagtggcacatgcctatagtttcagcaactccagatgctgaggtgagcccagcctaagcaacacagggagactccatctctaaaaatagtaataataaatacagaaaattttaaaaataaaaagggcacttagcctaaacttactattttattatttagttcatacattaaaaagagctctgaatatgaattattcactagtcacaattctttttttttttttttttttgagactgggtcttgctctgttacccagactggagtgcagtggtgcaatcatggctcactgcaacttccaccccctgggctaaagcgatcttcccactccagactcccgagtagctgaaaccacaggcacaagccatcacgcccgactaattttttgtagttttagtagatatggagtcttgtcatgtttcccaggctggtctcgaactcctcagctcaagtggtcctctgaccttggcctcccaaagtgctgggattataggcatgagccaccatgcccggcccacaagccaaaattcttaatgactaaataattttattaaaaataaagaggacaaggccagtgtggtagctcacgcctgtaatcctagcactttgggaggctgaggtgggtggatcacctgaggtcaggagttcgagaccatcttggccaacatggtgaagccccatctttactaaaaatacaaaaatcagctgggtatggtttcgggcacctgtaatcccagctactcaggaggctaaggcaggagaattgcttgaacctgggaggcggaggttgcagtgagccaagattgtaccatttaactccagactgggtgacagagcgagactccatctcaaaaaaaaataataataaaaaataaagaagacatatttttaaaatgcaattactataaaggacttggcagcaggattttaaaacaaaaatgactactttgaaaatctataaaaatgcatgcaagagcccatttgactaaagaagcaacattatccatgagtctttttatcaagattctgcagacaccagcttcactaacaaagagtagttgatgcaatgatcacttggtaagttacatacaccgctgagtggcctaggaagtgggtctgtatttctgcttcattttcattttgagctttcctctaagggcagtgtctagacacagtagtgaattgattgtgcttgagatgactcaggaaggcttctgagcaatcggtggaattaacccatggtccagaaatgatgggttgttaaatgaccaaaataattaagaacgtgtgtttattttcattacttgcaggaaaaaacatatttctgaagcatatcaatcagtccatcacctgggtactttttctacccaatgctgaaagtgaatatttgagaaactatgtttctaactggaagaattctgaaactatgttcttctacaacatgtagacgatgtgtcacaatgaaaatgaaagttccttctgaagagctgtaaccctacatagcctaggatgccatttatactttctctagcccagaggctctgtatttctgctctcaggctacattactacataaccatcaaaccaactgcccgaaattgctgagcaattgatcataacatacagacctgattcagatatataaattacatttttatttttatcgtaccaaaacatacaggtgaaaactttcaaattcaggcaactgacatgccaggtgcctacctatctgtgaagaccagagcactgtaagacacggaatagctggttgaaaagtgaaaaatccagtgagttaggttgtttgattatacagaatcatagaattttcaaagtgaaaggacatggtgatcactgatttcagtgactatccaacaacattagcaagagcccctagggttccctaccagttccttcagaagcctccttcaaagctgtgagtgcatggccaaaggggaagctacattcatcaaccagactaatcagagaccagggagcagaaataaggttaacacggaatggagtacatttgctttgggggacgttcatgttttcttgcgcatactgaaaacagctgggtgctgattttggtataacactcagagcctcttttgataaaaaggcattctatatgaatgaaaaccctgttggcttcacattggtcaaagcaatggattttaaatagtgactcaacttcctagaaaactttgtatttagaaatgttttcttcatacagctaacaggcaaaactaatcaaaaccttgttgttagtctgatgtttattttctgtgcagcaaacaaactcccataaaaacctctgaggttttcttagttatgtttgcaattttttaagtgttgaactgcctaagtctctgatgtcatgacacttaattcatatattttcttgcttttgctagaactgaacaaacactccctatcaagattgaccctctctagaaataaaataaattgtcatatgaagtcaaaatatgacctatcaagtttatgatagctttctttgacatttatgggaggagaaaattataccatccatactacataggttggggtttaaataatatttgcctataaacaataagcaattgcagattgattttaagtaaacgtatgcaatgcctgtaagcaacaggaaatatattttacatcaatgtatgcactgcctgtaagtaacaggaattatattttacatgaatgtgtgaagtgataattttttaataggcaaaaattagtgttaaaagcggaactggcatgctttcctaggctgtctcagtgataatgacctcaaagtcaatgatttcttcatgaagatgaaataagtttattgcaacttgattgcatcacctaaaatacaacccttgacttggaagcttgcccttatgttttatgaggtctgaaataaaaaggaaactgatggaactgaaccagcaaattattttgcaatccatgactacagttgtatacagcagatgtagtcaattgttgaggaaagttggaccaaatttccatcctgttcagtactgctgatagctctattcaaaatacattcttgcctttagaggaactgacccattagtaatcatacagatagaattttgtgaactatttttaaagggtaggttattaatcaatgagtgactctcaaatatcttgatggtttccactgtgaaaaccaagtatctgcatgatagagcaaaaatttaattttctcagatgctttagagtacatatagatgaagactgccttcttactagatcagttttgagagagatgaaaacaaaagaaagaaaaaataggatagctgatgaaatgaaacttcaaatttaatttgatcatgttggcattttttattccttgagtgcattgaaaataactgattaatactagacacatataatactatcaagttacacctaaaatttattttgtcagccaggcaaccaatcagaaccaaatagtgaccaagaattattttttcaaacacgtttgtcttccaggaccttactgagttagttccacagatcatgaaaacatgggtcttttctcaggtcttctacatcatttcccttaagttgacacccaaagtcataagcttgactttagacacaggtttcaaaagtagaaagttttattctcttatgtttctatggctttgaagttttgcagaactataaaaataatttgttttaccctttccacaactcatggacgttccttgaagtgaaggaaacgaatactcgtctttgcataataaacagcaaaaaaaaaaaaaaaaaaaaaattaaatgaatctaaattctcatatgccatttaaagtttcagacccagacatcttcaggattttcttacatttaaagcagaatgacactactgatacacaaaagtaaattttaattctgtttttaatgcatgaggcaatataaaaattaatcatgatgatcattatatttgttctaacactaaagtttttcccataatcccccagatttttcaagtctcttttctcctcatggcagatgcccaaccacagagagaaaggttctataataaaactttaaaaacactgacctaaaagagaaatgttttatcgccatgcaatattctaaattctggcatttggtggaaaaactgtacacatttttggcaatggctttagtgtccactggtctggcagctataatgagaataataaagtatatggtgatgactgtttacttaccattatgagacatccccactgcaaggcatttctgaaaccgacagtactgacatttatttctactttttttgtggatccgacagttaagatcacatctgtcatagataagcttcaatctgattgttctccggaagaaaccctgcaaagggataaaaaagaagcaaattttaagtctttatgacacatggaagcagcaacctacagcgaaaggtatactggcctgggaatcagaaaaggcaggttcttgacacgattctgtcactggtgactttagacaagtcacttaacctctctggaactaaatgttctctgctataaaataaagaaccagaggatctccaggtcccttttttagctcttagacactgaccacatccagctgcggctttcattggatcttggctctacatttggttttcggcatgctctaagaagtgctctggatttaatgtaatgcaaataaaacaccgtgtaatcagttaagtctctctgcaaatcattccaacagcatgccccagcctttgtaattgtgctaagcagcctggcaaagttataatcatttcattctaaaacatgatcagggccaataaaaatccacatgtggataatttttttggaattctctatgttgcataatttcctgcagaatttgtttcacttatttatgttgtttaaagtgtgccccatcattgttgtggcttacagacagaaagagactatgggaataacatgagaagtaatcagataaatcctcacaaaatcgactgctatctcaaaatggcaaatatgtcaatttgaggccaactgaatattctgctatatttacatctttggaaagagctgaaaaaaatcgaactggacgtgttttctgactccattttttgggttcatcatattcctattcatttctattgtgttcatcttcataaaacttaattgctaattctttcaaatgtatctggccctgtttggtgcaaaaagcactgcattagtattgctttggtcattgacatgcattttgactttctccaaacgtccatttagaactctggatgagtatgttctgattacttgacagcttcatttaaataattaatagccatctctaagccagcctgtccaaattgaagtcctgaccctcccctacaaactcacttcacttgcggctttctccatctcagcagacgcaacgccatccttccagtttctcaagccaaaatccttgaaatcactcttgacttctttctttcctcaagaagaaagctttctctaaatacacacttgcctatttccttcatcgccttcaagttttgcatctcaccttctcaatggggctaagccaacctatttaatactgtggcctgtccctgccccacctctcttctggaactcttgatcttctttactctgctccagtttttctcctttccaatagcacttatgactttctaacacaccacagaatttacttattattgttttagtgtttattttctgcccctccctcactgctcaattaaaattataagttcctcagcggcaggaatagtctcttatacccctggatggaatccaaatgcctatgatagtgctaaattaaaatttgtggaattaatacagatgtcacgtaacttcctttctgggcctcacctttttcaactataaaatgagaaagcacttccatctctggtagtttgtgattcccaattgtgactgagatgttacaaaggcgataggtttgacaaagtaatcattattctcaattttgggtttgtcatttccttgatctttaagaaaatataggctgggtgtggtggctcacacctgtaatcccaacactttgacagactgaggcggattgatcgcttgagtccaggagttcgagactagcctgggcaacaaggtgaaaccttgtctctataaaaaaatacaaaaaatttaggcaggtgtggtggcatgcgcctgtagtcacagctactactctggcggctgagatggaaggatcacatgagcccaggaggtctaactgcagtaagccaagttatgattgcaccactgcactccagtctgggtgacagagtgagacattgtctcaaaaaaaaaaaaaaaaaaaaaaaaggaagaaaatacagctttatcacatactatgtaaaacaaaataatatactatttaattttgcttgttttgaggctttattaaatggtattatactatatgtagttttctgggacactattaaaatttggtatgaggtttctaacatttaagttcttgttagtgaaagactatgatttactcattttcataattatatagtattccattgtatgactatactataatttattaacctatttgtatgcagatggacgtttgaaatatcaattttttgctattatgagaagagtttctctaaatattcctgtaaatatgtttaagtggcatttctgggttgtacaatgtgtgagtattaaaattttacaagataatgccaaattgttttccaaagtggctaccaatgtacactccccacaagcgctttatgaaaattgtagtctcttccacatttggtgctgtcagacttcttaattttgacaatctgaaatgtataaaattgaatttaaatcttgatttgtatgtccctggcttttcacttcccagtttctaactgtcttttccttaaaattgaattttagacttttttaaaaaatatgctagatattaatctgttgtctgttacagatgttcaaatatcttctctggcttactatccttgaaatgtactttttcagtatttttgtttattcaaccaatagatatttcatttcactctttttgttttgtttgttttttgttttgagacagagtctcgctctcttgctcaggctggagtgcagtggtgctatctcggctcactgcaaccttcacctctcaggttcaagcgattcttgggcctcagccttctgggtagctgggattataggcatgcaccaccatacctggctctttttttttgttgtatttttggtagagatgggttttcaccaagttggccaggctggtcttgaactcccagcctcaagtgatccacccaccttggcctcccaaaggcctgagattacacacatgtgccactacgcctggctcactctcattcttgagagattaccaagtactcagtcattttctcttaacactttgaattccattatccttctgcttccattttgctgttgagaagtctcttgtcaatttacttctaaggtgatctaccttttctctttggttgcttttatactctctatttgtctttagtattcggcagtttaaccgcagtgtgtttgggcatgaatttcttttcatttaccttcttggatatgttgtttatgcattacggcttcacatgttcatcagtactggactccagttagataagtactagactttcttattctagccttcacatttctgaatgcctcttttttattttccatcttcttctcactacttactcactaatattgattgccaaagtaaaaatcagaacagaagcaaaataacatgaaaatatataattacactggcaaaagtaaaaacaaacatttctcactaaagttcattagtgagaacagttctgcactttactcttccattgatcagtgaagaagacatacctctttaatattcaaagatcctatgaatccttcaagaactaaaagccttcaaattccagcagatcctggatagggcatattctttaagacactgttgctttcattctggtaatttctttgcatatctctttcagtttcaggtttttcttctgctgtgtccagtaagctatctaacccttccactgaatttttatttcaataattatacttttaacttttagaagcttcacctttttttcacttggttttcaaatcatcctggttattcctaatagtttattgttgcaagcctatgccctcttcctttaaataattcataatagcttttttatattctgtatcaggcaatcccaatttctgctttccccaggtaggggaagagcagggagtctgtatcagttttcttgttgatgatgaatgtcattcaagatggttagcttctcacatgcttgctgatattatttggaactagtttcttgaccttaaactgggggactcctacaaggtctgaattaggaattcagtagccaggggtgttactgacttatgactatttcagacactattgagaatcctggcttaattcagaagccctacacttagctccttctcacttattgctcagaaaactgctacagccatctgcctttggggcaatgctcaccactgtacctctctgggcatctatcatggggaaaaccctgacctgctaagtgtgcctgcagctcacagcttggaactgagggtatgtttgtttcattttgtttcattgatgttgttttggagagttttcactacctcttgtgagatcagcaatgtcttaaagaatatgcccgatgtagaatttgctggcagttgaagtctctttaattctcaaagggttctgaggaccttcagatatcaaaaagtttttttttcacagatgaacagaatgctaatgtatagaactgttctcattgataaatgttggtgaaaatcctgatgtttgccattgtgatcatagatattttatgatattccttgacttctcttttgattcttgctttttaaagactaatattagtgggtgaaaatgctacttggctagctgacagctggatggctcacagagtgctcagttatttggcatggctaggagaggaaggtttttttgataagagaattattgatcccttccttacaccatatacaaaaattaactcaagatggattaaagacttaaatgtaagacctaacaccacaaaaaccctagaagaaaacctaggcaataccattcaggatataggcatgggcaaagacttcatgtctaaaacaccaaaagcaatagcaacaaaagccaaaattgacaaatgggatctaattaaactaaagagtttctgcacagcaaaagaaactatcatcagagtgaacaggcagcctacagaatgggagaaaatttttgcaatctacccatctgacaaagggctaatatccagaatctacaaagaacttaaacaaatttacaagaaaaaaacaaccccatcaaaaagtgggtaagggatatgaacagacacttctcaaaagaagacatttatgcagccaacagacatatgaaaaaatgctcatcatcactggccatcagagaaatgcaaatcaaaaccataatgagataccatctcacgccacttagaatgatgatcattaaaaagtcaggaaaaaaacagacgctggagaggatgtggagaaataggaatgcttttacactgttggtggaagtgtaaattagttcaaccattgtggaagacagtgtggcaattcctcaaggatctagaactagaaataccatttgacccagcaatcccattactgggtatatatccaaaggattataagtcatgctactataaagacacatgcacacatatgtttattatggcactattcacaacagcagagacttggaactgacccaaatgtccatcaatgattgactggattaagaaaatgtggcacatatacatcatagaatactatgcagccataaaaaaggatgagtccatatcctttgcaggggcatggatggagctggaaaccatcatcctaagcaaactatcacaaggacagaaaaccaaacactgcacgttctcactcacaggtgggagtggaacaatgagaatgcatggacacagggcggggaacatcacacagtggggcctatcagggggtggagggttgggggagggatagcattaggagaaatacctaatgtaaatgacaagttgatgggttcagcaaatcaacatgacacatgtgtaactatgtaacaaacctgcacgttgtgcacatgtaccctagaacttaaagtataagaataataaaaaaaagaaaagataacctcaaggttatggttttattgccctgtagaacattaaccattctgaatcttatctcaggattctttctttcagtgactatatattcttggtccttcaagttcttctttgaactagatttaccatcctgcttttccctcgttaatgggttttaaataaatctttgacacatgttcaaaaaaaaaaaaagagaattaagtttaactcttataatggaaatttctgacatgactcagctgatgactttcaaaagtgtatcacattttttgtgatgatccaaggtctttcaatgaataatcattctgaacattatacactgtatatgtaaataaaatcttgaactgaatacacagatcctagcatgcatcttggaacttgcttttactttttttacaccgataaccaagtgttttcttgttatgtgactcaaggaatctagagaggaagatgtaaggatattatcgagtgcttttctgtaaaattatttatcgatttacagaacaaggctggcttctccaaattttcttcatattactgatgaagaaacactctaataacacttttttattattttagagtccatagaacaatgtattttcaacaacttactcttctgatgatcaggaagtctgtgatgtggtgtgttagagatgcatcagtcaccatctgagaaaattgttttgtgtatatatttattctaatgtctgcacatttgtctgctagaaagtaacagacaaatttttcatatcatttgaaaaattttctttgatctctccttaattgctttaattttaacaaaacatcagggacaatgagacctcagaatggtgttgttgattttacaatgaaattaacagccctgtgctgggcttgcagttggctttcccatgaagcagtctggcccctggaagttggattaataagctacgactggcaggtgagaagaattaaaactctttctgaagtagggatgaatagacatacaagtggctaacaagcatacggcattcttttgtatacagaaatacaaacttagattacattgtattgtatggtagactgtatttacttatatctttaggtacggctatggttccaaaatgatctttcactaaagataaaaaataggatggaacttaccaaagaaaaaaatatatctccaacatgtaaacaacaaataaatgatagctttccaagctctaaattatatatatctttcagttgctaaaggttttattttacataagtttgcaatattaacatacccaagaatctgtaactatttcaccttaattcaaacccaatctactcattctcatctgtctgactgaatttttggcaagaatcactaatataaacctgttccatttacattgtaaaattgtttaggaagatctaccaaaagttgttttatgctgtgtttattcttttcaatccatagataagcctgcagctttgtggtcaactgtattttaattatgaatataacccacattttactacaacagcaaatgtgaagcttccaaaacacctctcagaaaatacatgcagatgagttaaacacatttgctaattccattttcctggctttttattgcgtattggttataagctaaggagatgtctttactgacagccactggtctaatgcagcagtattcagaatgtggcagcaattttgtctagtttcaaagtagcaaagaatgagtaactgcatttcttcagaatgagactgaaggctttatggttgcaagatccctttactctttttaaaattatagaagaccccaaagagattttgtttatgtgggctatctttactgacatttatcacactagaaattacaactgagaaattattatatacaagaacacataagcaaacattccattagctaccagagctatgtcatcatcctacatcatgtagcttccagaacactccacatacactcctgagagaatgaaagtgaaaaaagtaataaaaatcattattatgaatatagtttcaacttcatggatgccttgaaagggtccaagccccagaccacactttgggaactgctgatgtatacttgaagaagccaaatgataatgtttcattatgtaaccacatcctaccaatatcatctgaatcattttctagatgagaaaacctgagtaggatgtggttaaataatgatatatgcaaatgtacctcacatagtatctggtacatactaagaattcaataaaaatcagaataagaattcaaaaaaagtttcctttttcgacccatcatccatttaggaatcaagatgtcctaattctttcctaactgctgttctatatctttacgccgaataaaaaccccagccgaagcagggtttattttataaggtaaatatttatgaaaaatttattctgtgcaatcagtatacaataaatgctattttattcattgagtatattaaaattattttgaaagactgcatatcaaaatataagtggattcacatattttctttatattaagtagtatattactaaatgtttaaattttccaagaataatatttttcttattcttacctttaaaacgtgtagatgtctattttccctttccaagggagtaaaaccttccttacattttagtctaggaattctggaatccacattttggatggtttgcaaattactgcaggttagtatacaatacgcttagttttcttctatgtttgctttttaatctatgataggttaaggactcccctagagtcttcaggttttattaagtattttttctccctccctgctttctaccctttctaatcctaagttgaaggcacttggatttcctcctctctcttctctttttgctactcttcttccctgcttgcttttaagttttagtgccctcagaactcagatttatcactataaccaactactgacaatgttcttgtctttccattttcagctgttttcagtaatgttagctttccacaaatttgtgactaataggattatggtggaactatttgcttaaaagttttagttttctaagtgctttactagcccataaaaaacaataacttattgtggaaccttaaaccaaccatgctgtttttatttatttatagttgtaaattatcaacatgaccaaaacagaatggtttcttcagataaatatggctcagaatttagcaacagtttactcactcaaaaatggtatccaactcagtaaaaataaactctaactcattaaatctaaaataaaactcaataaaaccacaaaacattcaataaaaaatctaagtcaataaaatgacatgttcttactactcatcaagatcttagataactgacttaatacaatgatttcatataaggtcataaatattttaacttggtttaaattacagaacggacgggttttagtgttttaaatgaaagcatctcttgccagagtgtttcaaagtgtcattttgaaattacagaacttagagatgaataagaccttgtgtagccaatctaaccaagtcattttacatatggggggcctgatgaaggatacaatgtgtatgtgactggctaatgactttggaaagtggcagagctgacctctggtttgtcccttttcactgtattaggttgcctttagagtaaaaactgtttcaattgaagggactttagagatcatgtaattcagtgtcattttatttatttacttatttatttatttatttttggagttagggtcttgcttttgtgacccaggctggagtgcagtggtatgatcatagctcactgcagccttgaacttctgggatcaagggatcctcttacctaaacctcccaagaagctaggactacaggcatgtgccaccatgcctggttaattttttaaaaattttgtagggatggggtctcactatgctgcccagactggtcttgaacccctgggctcaagtgatcctcctgccttggcctcccaaagtgttgggattagaggcgtgagccaccacactcagccacaatcattttatagatgagaaaacctgggtaggatgtggttaaatactgatgtatgaaaacgttacctcatacagtatttggcatgtagtaagaattcaataaaaatcagtttccttttttggcccaccatccatttaggaaccaagatgtcctaaaactttcctaactgttgttctgtatctttacgttgaataaaaagcccaataagcaggtatttattttataaagtgaatatttatgaacagtttattctgtgcaatgcgtatataataaattagtactatttttgcattgtgtatattaaaattatcttaaaagactgcatatcaaaatatgagtggattcacatattttcttaataattaagcaataaattactaaacgtctgaattttccaaaatacccttttcacaaaggaaagagatgaggataaatagtatctcctttcccacactgttatacctccttacctgtccgtgtatgtggctcacattgatgctggaataaggaaacatgaggcactgctttgagagccaacaccacctaaggagtcagggtctagactgcggtctgccacttactaagggatgaccttggcaagttttactaacctgtaatttctacatctgcaatgtggccataaagaagtccaatcttataggattgctctagggatccaaagatatgcatatataaataatctgtaaaatcttctgtctatacaatattacacggtatagcaaaataaataaataaataaataaataaacaactagagaatgcaggaaatctgcatcctggttccaggtcatcactgtcttgccatgacaccttggagaagtcacctttttgtaaaaatctgcaagatgcaaggattaaattagatcagtgtctcaaagaatcaatttggagaaacaaatgtggggcaaagcagcccaactttttccactttcttaggctttcaaatcttatatcatcctttgggaggctgaggtgggaggatcacttgagcccagaagctcaaggctgcagtgtgctaggatagcaccactgcactctggtctgggtgacagagcaagatactcttccatgaagaaaaaaaattcatatattgtatcacctaaaaaaggggttctgctgaaatgaaataataaagtttcaacaatttctttgaagactttttttttaattaccttgcatccttcacaagcatgaactccatagtgaaatccagaagctttatctccacagacacgacattcaattgccatgagggagttggaaggctcttcatgaggcttattgtagagctgagtcttctcagaataataaggtggagatgcaggctccactttgattgcacctgtgtatggagacatgtgagaggataattatcccatgaaaacagtcctaaaaaggcaacagggcaagccaccatagtacaccttcatgctgtatttgtattgtttcagtgtaaaagcacagtggaacatgaaaaaacactggagttaaggcaagaaaaagaaaggtttgtaatcacaggcaagttataacatctctaagcctcacctgtaaatataaaatgggaatgagaattaagtctgtggttctatgacccccagtagcctgcaatactacagctgtaacagacaacatagaggatttgagacaaggaagcttattttgctaggaaatgttctgtctttggtattcatcacaatattaaattatacattttatttaaatattccattttataagtactttgaaacaacttgcaaaagaaccacagaaggaacaccactgtgaaaaggtcatggtatgcctagcttgaggtgcatgaaaaatatgagcccaggttaccattagtgttcagtcaaaggaggtggtttgtgaaataatctttgacagagcgtggcggaacttatggaagtaagccctaccttttactagttgggctcagggctactaaatttccatattaggctctaactgaaaaccgcatagataaatataactaagcatattatttatctttaaaagccactagaaatacaggaagttcttacttgtcaagtaatgattgccaattacatagtggtggctttggaaaaccagcatgtcagcccacacatgataaaaatcaaggaaatagcatcacagaaatacattttatctcaaaaagtgcagttctagtttttcttgagtctgatgttttgatgttgatttagttaatggcatgaaaatttatcaataggctacaatgttaaaacaaatttgtgcttaaaagtaggtttcagtataaactcctgaaaggacatactagaaaaaatgtactgtagtagcagtaatatagtgaagataagttatataatacaaagtgacttggaattgttacttattaacttataaggggccaaaataattcaaagtttggatgatggactcttagcctgagatacaactgacagtgtaatcaaggtagaaaatgtccctaagaaggaagtaagcaagaaaggaaagaagagaggaaggaaggagggggcggggaaggcaagattgacctcgtgccagctcccttcctggcatttcatagatacctaatatttcatggataaatgggtgaataaatgaatggtgaatgccttctctattagatttctagtctctggagcattatttattacagggttactgagagatgagtccaattctagtcctagtagtctgaaaagtgaaaataaacatcatactttggtactcttgaagtttcaggtcatacttgtaatctgcaaccactggatctgttcttgtgaatggaatgtcttcgtaatgtggagtagaaatgctggagaagtcaacagtagtgaagggcttgatatcaaaggagtgggagtggtcttccattacggagagatccacggagctgatcccaaagttggtgggccagaatggcatctctgtgtcaaccatggtcatttctgaaaggaaaaatagactagctgtgaagttaagtcctagagaacacagcaatctcacagagtttcagaaagagaaatgaaaagagtctttggcaaagtaatctcatctgggcgctcacaacaacagaaaagaacataaccaccttcttagtgctgtctaggctgttttatgatagaaaggaagtcaccctttacccaggtatcataatagaggatcctgaaacagtgcagatacatacagtgtatccatataaatgcctttttgccaacaggcctgctctcattaacttctacattaggtcatcaattgagtctgttaatgactgctgttatttatttaaaattttgtccagctttattgagtataatagacaaaaatttttaaacttaaggtatacaggccaggcacagtggctcacacctgtaatcccagcactttgggaggcggaggcaggaggatcacctgaggtcaggagttcgagaccagcctggccaacatggtgaaacctcatctctactaaaaatacaaaaattggccgggtgtggtagcacgcctgtaatcccagctacttgggagactgagacaggagaatcacttgaacctgggaggcagaggtagcagtaaggcgagatcacaccactgcactccagcctgggtgacagagcaagactccacctcaaaaaaaacctaaaccaaaacaaaacaaaaaaacccaaaaaaccaaaaaacaaacaaaacacttaaggtattcaatgtgatgttttaatatacgtatttactatgaaatgattatcataatcaaggtaatgaacatattcatcacttcacagttacctttttgagtatgaatatgtgtagtgagaacacttaacatctactgtcttagcaaatttcaaatataccatacagtatcactaactatagtcaccatgctgaaggtgacctatacttagcagatgatcaccttagaaggtgaccagagcttatcctgcataactgaaactctggctgatatctccccattgctctcaccctccagctcctggcaaccaccattttactcactgcttttatgagttcgacttttttagattccacgtggatcatgtggtatttgtctttctgtgtcaaataccacccagtttaattctcttagcataacgtcctctaggttcatctctgttgtcgcaaatgacaggatttccttctctttttaaggctgaataatattctattgggtgtgtacatatacatctgtatgtgtatatatgtatgtgtgtatatatatacagatatatactgtgttttcaaaaatccattcatccattgacacttaggttgatttcatatcttggctattgcgaataatgctgcagtgaacatgggagagcagatagctcttcaacatactgattccatttcccttggatatatacccagaagtaggattgctagatcatatgctagttctatttttaattttttgaggcagtccattctgttttccataatgactataccaatttacattcctgccaacagtgtacaagggttccctcttatccacatccttgccaacacttcttatcttctgtgtttttgataacagccattctaatgggtgtgagatgatatctcaccgtggttttgatttgcatttccctgatgattagtgatggtgagtaccttttcatatatctgttggccacttgtatgtcttctttctggaaatggatattcctttatcattttttaactgggttatttgttttcttgcaattgagtttgttgagtttcttacatattttggaatattaattccatatcagatgtacgatttgcaatccataacttcatatcagatgtacagattcccctattctgtaggctggcttttcactttattgattatttcctttgtggtgaagaagtttctagtttgatgcaatctgttaatgattgtttttaaagtgtgcacagggttccaggacaattttactctcttgaaattagaagcccaaaatatttttctctttaggatgaaatttttgctattctacttgtatttataatgcttttgtgtaatagaaaagttggcaaattaaatttaggtaaatgaacttcttctttaattgcatcctaaaataattttgttcttaaaataatacaaaaataaaaaaattttaaagggaaaaatcactcaattattacttctgtactatgaaaaattactcaataatcttttctgtggatacaccttttcttaaagcggagaaagttttccccacattgagaatagaaaggttagagagatatgtggaaacatttgatcacacccgagagtgtcaaaatcagactctagcccagcattaattttaaaccatccccaaaacaaaaacaaaacaaaacagagatagaaacaagaaaacacataaaagacaaaggaaaaatgcttacatggattctaaggccacagaatagcaagtttcatgaatcatttgcccaatatcatgtatgccacatgcatttttctaaacatgatttattgtcacagtaagtgcaacaaaactcttttggttcacttcatgtaaacttgtgagccaccgagggtgcagactggaaaactttctgcaataggtacctggactctgtttacctgacaccagttcattattcaaagtggtgccaaaaaagcagtcataggtattttaaatgttaactctgtggtcaaaaacaccagtggagagctgtgtaaatttaggactgctcacacgggagacagagatgagctgctcataaactccaggattcatcaaatcataggcgtatctttcttgtttgcagtcatatccccactggctaacaaagggcttgtctcatagtaggtgctcgttaaatatttatttattaaatactaaatacattgatgacttaatgagatagctgtgaagtttcagcagaaggggcagggaaggagggaagcaaattggtattgatcaagcacttcccatgtgcccggtacatcctaccttttcttctgcataatctgaaatattattcccactttatagataagcaagctaggaccaaagaagtaaagtgaattgttcaaggtcctctagctaggaagtagaagatgcaaactcaagactgaccctgaaactctcttctgtatatacatactctcttgattctctcattgatgaaacaggcttatggaggaggggccactctcctctgtgtatctgtgcatgggcctcttgcttttcctttttcttttcttttatttatttatcatttttttggagcaattttattttaatgctctcactttaacaccacttgctttttcttaccaagcagattgccaagaaattcactccaaaggcaaacttttgcatgagttgaagattgaagatttcggctgtcatcttcataagaaaaaatgccctgaggccgggtgcggtggctcacacctgtaattccagcactttgggaggccaaagagggtggatcacctgaggtcaggagttcgagaccagcctgatcaacatggagaaaccccatctctgctaaaaatacaaaattagctggtcatggtggtgcatgcctgtgatcccagctactcgggaagctgaggcaggagaatcacttgaacccaggagagagaggttgcggtgagctgagatcacgccactgcactccagcctgggcaacaagagtgaaactccaactcaaaagaaaaaaaaaaaaagccttgaaaatataaacaagactggtcctgtgaatgcgcgtttgtggtttcaagaggactaattaggtaccgtatgggttcacatgtctatctacataaataagtacccaaacaaccttaagttatctgtgtttcagtgtcaacactgcacaccaaaaaggggaatgtgtactggtgatagttaaaggtcattctaggtctcaatgacatccagaaaaaagtctgtgctcctaaggacagggcacccatccaactgtgtcctttgtttcaaaattcgtccaaacctgtctaacccaggtcattccatttactttgtctgtctccttggcaggcttaattttcatttctgtatctacttttcttagtataacttattttcatattaaagtatatttcccttgtctacactgtaatatccacaaaggtgggtttatcacctatttctcactatgctattgcaaagttttctgcatacagaataaaggctgacaaagtgagttaaaggtagtggatatgcttttgtatgaatactgggaaatgaaaataaggatgcacaaatatctggggtgggagagaaattggttgctcatgattttactggtttaattttgctttgtttcatttttaacatacaatttcagtgacttcctatcaatcacagccatgctgctttctttcctctctctctctctctctctctctcccacctccccaacctcacttttaaagagacagcatctcactgtgttgcccaggctggtctcaaactcctgcgttcaagtggtcctcctggctcagcctcccaaacttccgggaatataggcgtgagccactgtgcccagccaaagtcatgcttcttattacaaaagtcatatccctaggggtcgtgtattacattgtggaaattttgggaaaatttttaatgtgaaaatagccatctatgtgttaaggaaagaaggaaaagttcatgtaatttttaaaaatattatatgaaattcctagaaaactctgtacttgtagtacatctcatggctaaaaggatgctgttttctgttttcgttttgttttgcttttcatagtagcctttacttttgtgagagcagttttagggttacataaaaattgagcagaaagtacagagctcttaaaatagcccttccccagcctcctgtcccctctctacaaagcatggttttcccctattactaacaccttgcacagtgtagtatacctgctataactgatgaaccaatattgacacattattaccacctaaagtccatgatttacatcaaggtttgctctttctgttgcatagttctacatttttgttttgttttgtttttgtttttggtggagtctcgctctgtcacccaggctggaatgcagtggcacgatcttggctcactgcaacctccacctcccaggttcatatgattctcctgccccagcctcctgagtagctgggattacaggcgtgtgccaccatgccctgctaatttttgtatttttagtagagaaggggtttcactatgttggccaggctggtcttgaactcctgacctcaatggatctacctgcctctgcctcccaaagtgctgggattacaggtgtgagccaccatgcccagccaagttctatgggttttgacaaagacataatatcatgcattcattagaggatcacacagaatagtttcactgccccaaacataccccatactccacctattcattcctcccttcctccacccaagaatggtatggttttgctgtcctctactagtaagggcatactggtggaaaagcaggagaaacactggccttttagcttggcattcaaggccctctatgtctcagccctaacttactttttcagtcttatttccactggttatcccagacctcgctcccattcttggcatatctggtggctgggcatatcatactatctgcccaggttaaacatgccctgcctcttttagtcatacaggttactgaggctgctgtatcttcttcctactcctcacctcttcatgccacaagcctgtttgtctttcaaaacccagtccaaatgctactttctctgtaaaaccatctatgaatcctccaacttaaaaacactccattctctgtgttcccacagcactttgtacctcctcctttaactcagatataattatctggataactatctccaccattagacttccagtctggagtaaaaggacagcatcttattattctatcttcccatgtgcatattctatgcacagtttttttttttaaccaaattcttgccaattgatgatcatattttatgcagaagagtagagtaaattttcattttgctactaaagatggaaaaataacaatactttctcaatagtttagttttgttaagacttaagttctctccaaaaaatgttaatcttcaacattatcaataaaatacaacttaagccataaccattccccttaacgatgtatattcagttttttctcttttgctgattacaagaggaaggttgtggtcctagatggttttcttatttttctaagttgaaaggacaaagtaagaaagaaaaacagcttgcctcttcatctctatgaaaacattgcccaaacacacttttccccttcccccctgcccttctcccttcccttttactctgggacaccttgacctaaacaatattattccatggaccatagttactgggaggcacagtggttccctagacattttattttattttgacttagagatgggtccagaaagcctgcttctaattttgtctctagaaaacataagctactgtttctgccaagctgtaagttgaggaggtgttttttgttactccgtgcaattacccatgaaagaacaaatgaacaaaatatttgcatgaacaacagcccttctcagtaacaagaacatgtcttaactccctagctggtgacactgagttgtgttgcatcagtggtatatccattaatttcacaacctttagagtgtttcaagcaggctaaagtctttaggcagaacttgtgagcaaaggacatggatgtgtgccattatcttagaccttcaaacttggctttaaatgctattatagtcaatgcgcagacttttcacaatactcaaaggatgaagtagtgcaacaaaaatacaaccaatttcatgcaaaaataaagtaacttctttaatctgataggcattattatttgggagtatggaagtgggttggaaaagatgctaaattgtaaaattgaacaccagaaatatatgctttacctttggggttttatgttgtcccttacgaaaagaaaagaaaagctatgattagaatagctggtaaaatgttacatcttcttcatatttacattagctaatactaacaggacactaaatctgtgcaaagtactacgccaaatattgtgcccggattgtgtcatttaatcctcacaaccagcccgaggaagtaggtgcatttataatttactttaaagatgggaaaactgaggcatggacctggaagtaagtaacttgcctaaaagtacgcagtaactaagcagtagaactggcattgaatccagatggtctgaagctccatagcccacacttgtgactttacactggatactggttagaaaaacattatttcttcctgatcttccagttctatattaaacaattatttaacagttccaacaaatcttcatgaatacctataatgtgccaggcaggcaggggggcaggggatgtactatgaagagtaactctcaaatgaaagctttattggagaaatgtgttcagctaggcaacaagagtacgtgcctgaaaagcctttcataggtcctttgtagttttgttggaaatgaccttaaaagacacttaaccgccgatttttcaatcccttctcatttgtttcagttaatgtcatggtactcataactgtggttccaacttgtttatccagcccatccttactgattcatgcagatcaagatcactctgcagtgtaaactgacctgggaatttactaattcctctcccatcatgacagcgacatccagagacaagaatcatcctgaaacactacagcagaaaaggctgttttgagatcatctgagttctcatttgacagataaagaaaatgaggcaaagtgacctgctcagggtttcctggtgagctagaggctgactggacgggagcccagcttggctcctctgagcctggcattctcagcgctgtgttatcaagttgttactacatgtaaatatgctgaaaatgggacttttaacctttgccacttttcacagatccagatttattttttgggggtctttagtgaatgtatatgaatgtcatcaaatttatgagggaaaaagtctcatgtaaggaaccatttcctggatggcaaattatcacagaataaaatgcgaagaactaaatctgtaacagaatttgtttctaacaaaagtcatgaactctgaattaatcaaaaggcgtagggaatagtcttgaatagtctaataaagtaagcattatcttggtttgtttttacatagtaagtacagatatacaaatgttgtttgcttgctttgtgccgtttgctgttttgaacattaacggtgaagaaggatgggcacagctccatgtcagatgcccgaggttccaatccaaccctattgctggaagttcgtatctcttcatatctaatctccatctgtagaatattaatattgtctccctcctagagttgttgtgaggattaaattagataatgtatgtagagcacttaccatagggctggatacttaataagttctcaataaatataattaatattaatagtataacagtaatttgtgtacacattagtcaccagagtactacagtcatataaaaggtgggctaaaagcctccaacactaccactaggggacaggaagaggaagaaccgccagcaaagccctattgtttaaacaggactacgcctaaaacagatgtcctgttttaaaggcctctggaaaaggagagtccacagctcctcttggttactcattccaatgcttaattgctctttagcagccaggaaagtctatgtcttatctggcatttccccaactgtgttatacatatgttaataatgttcctttaaaaataattaaaaacaaaacaaaaaaaatctggtgatcaagtaaatttaggcaatgctaggttaagcaaggttaaataggtttactgtgagacttcttaaactaacaggctaatgttcacgagaatacacaaaagagagaaaaaagcacagtgtgcaatatttgaggagtttaatatgtgatggaatatggtttgagaaatgatgatctaacctatgttgaagtttgcgactatctcttttttcccattttttaaacatatagttatcatcctctgcatatttgccttttatcacatgtacttgaaacgtattcctgagttgttcctcagtttttctttaaccttagaatgactaagatcaaggatttataaaacagtaacaaaacccaagagagaaaggatttcttaaaccacacagaaaggaacactgtcaagattaataccccttctatagagatgatcataagtacttcctgacaggaaaaaaaaaaagtaccatagaaaggatcaggaatcagaatgacactgaacttctcaacagtaacactggaagctagaaaatcaatagaacaatgttgccaaaattcaagagaaaaaaaaatttccaacctagaattttagactcatccaaatcgtccatcaagtatgagagtaaagacattttcagaatgataaggcatccagaaaagttacctcccacgtactctttcccagagttctccaccagaaccaagaagagaaaagatgggaccaggaaacaaaggatctgaaagacaggagagaggtggaaggtagtcccaggctacagatacagagcagcctagagaaaatgcaggaggaagaaggccaggtgggatcacctgagaaaccagaatgcccgatatgtctgaccactttcagaggagtttttattactctgtcagagagtttgaggatgaattagtgatgagtacatagcaagaaatgacaacaaaatgagcaatgactaagtgacaaaaattaactccagaaaagtaaatagctaagcaggagaggaaacagaatcatagcacactgcttggctcaaccttaagcagcactttcagttactacaatgtaagcacagacaactgatttaaccccaaattacaagtaactacattgtgaagatggaggggagggagaagtatgtgttttggaaaagggaatatggtagtaaaaggactaaattattatctcccacagtaagaagtcaatggataagaatacaattttaaaaataatagtataagttattattattataattatttttgagacaaggtctctctctgtggcccaggctgtcgtgctgtaacgcaatcacagctcactgtagcctcaaactcccgggctcgagaaatcctccaacttcagcctcccaagtagctgggaccacaggcatgcaccaccactgctggctaatttttgtattttctgtactgatgaggtttcaccatgttgcccaggctgatctcaaactcctgggctcaagcgatgtgcccatcttgacctaccaaagtgttgggattacaggcgtgagtcactatgcctggccattaatgtaagtatgttattctagagataggaaggtaaatgccagaagaaatatgtgaaagaggtaaaatcactgcctatgaggagcgggatttagctgtgggaatgagtatctcttcttcactgaaagctgtagctgtgtacgagtgttatttagataaaggtaaaaattaagctaaaattcactatcttttaattataatatctttccatgatttctcctaacagagggagtaactctatttcttacatgtgttaaagtcctcttaaaaggaattatcatgcaatcatctggaaaattggagaaaattttaatgtagtttcaagtagaatgaaagaaaatcagaaaatggttttgatgcttcagccacaaatggctctccttttgactcaagcatttaaaaaataaattctaccaactcacttcttttccttcacatagtatcctgagttttgtttagtgaaggaggaaaagactctggaacccatcagcagaaatacaatttagtaacaatagctaacaattattaagtgcttgttgtaaacagtcctatgttgttatacacaagtattattaccacctaacagattaaaaatattagacataaaaaggttaagtgacttgcccaatgttaaataggtattggggctagagtttaaattctgtcatggtttctctgaatatagaatcttttattttgggcaccatgaattaagaaaatgattagaggctgggcgtggtggctcacgtttgtaatcccagcactttgggaagacaaggtgggaggatcacctgaggtcaggagttcgagaccagcctggcctacatggtgaaaccctgtctctaccaaaaatacaaaaattagccgggcgtggtggcgcaggcctgtagtcccagctacttgggagactgaggcaggagaatcacttgaactcgggagatggaggttgcagtgagccgagttcatgccagtgcactccagcctgggcaacagaacaagacactgtctcaaaaaaaaaaaaaaaaagaaaaagaaaaaaatgaaaactattagaaattaactatttggtgtgtcatttgcttcttcaatataaacaaatgtattttcattttattgtctacttagactatattcaaaaccaaattcaatgtttctgaagtttgatttcccattgatagctttgagattgaaacattccaatatgtatctttagatgcaaatttctttataataagccagaaggtctcacaggaaattttcaaattcagatcaacaaagggtattagaaagaccatgttttttattatattttatttaattttactattattttttgaggcagggtctcactctgtcatgcaggctggagtgcagtggcacaattatggttcactgaagcctcgacctccctgtgctgaagtgatccttccacttcagccttccaagtagctgggaccacaggcattcaccaccacattcatctaatttttttatttttatttttttatttttatttttttttttgtagaggcaaggtatcattatgttgcccaggctattctcaaactcccggactcaagcaatcctcccgcctcagcctcccaaagtgttgggattacaggcatgagtcactatgcttggcccatgttcattttcaaaagcatatttcctcttgcatgagccacatcttgtctagggagtttgcttacgctggtcctgaggtatcaggacacagaaaagattacaggattatgccctcaccaatataaacatttcttctgcttcctcagcaaaaattcattatggtcaaactagctcaagcttggttcctctgctaaaagtaccttcatatatttctaaagggagatattactaataatctgattaggactaaggctaaatctgttgaacagttgctttggtttagttgaaattctactttgtctagtacgtgaagaatgaatgaaagttattcagaaatgaaagaggggtatcattacagatctcattgacattaaaggataataggctctatgctcacaaatttgataatctaggtgaaatgaactcattccttgaaagacataattttccaaaactcatacaagatgaaatagagaaatggaataggcctacatttattaatgaaattgaatcaataactaataaccttctgaaacagaaggcaccggactgggttcactggtgaattctaccaaacatttaaggaagaaattataccaattctctgaaatctctttcagaatataaaagcagagggaatacttcctaactcattcaatgaggctagaattaccctaatactaaaacaaaacagacattacaaggaaaataaaccctatagaccaatctctcatggacagacatgcagaaatctttaacaaaatatcagcaaattgaatccgataacgtatgaaaagaattatacaccatggccaagtgagatttagctaaggtatgtggggttggttcaacattagaaaacaaattaatgtaatccatcacacccatagcctaaagaagaaaaatcacatgatcatatcaataaatgcagaaaaagaatttgacaaaataagaaaacttcctaaacttaggaacatctacaaacaaaacatatagttaacatcataagtaatggtgagaaactcaagctttcccactaagattaggaataaggcaaggatatcttctctcactactgcttttcaacatcatactagaagtcttagctaacgtaacaagacaagaaaaggaaataaaagggatacagattgggaaggtaaaaataaaactgtctttgtttgcaaatgacatgacttctacataaaaaaatccaaaagaacagaaaaaaaaaaaatctcctggacctagtaagtgattatagcaaggttgcaggatacaaggttaatatacaaaagtcataatgctttcctatataccagcaatgaacaagcgaaatttaatattaaaaacacattacccccaaacagacattacattttcctcataatgtctgttttgttttacattagcaccccgaaaagtaaaatacttaagtataaatttaataaaatatatatgaaacctatataggaaaactacaaaactctgatgaaagatatcaaagaatgaaataaatggagagacactgcatgctcatggataggaagactcagtattgtcaagatgtcattcatcccaacttgatctatagattcaatgcaatcacaataacaatcccagcaagttattttgtggatattggcaaactggttctgcagtttatatggagaagcaaaagacccgtaatagccaactcaatattaaagaagaagaataaagtcgaaggactgacattacctgacttcaagccttactagaaagttaaagtaattaagatagtacggtactggcaaaagaatagacaaatagatcaaaggaacagaatacagagcccagaaataggaccacataaatgtagtcagctgatctttgatgaagaaaccagggtaatacactggagcaaagacagtcttttcaacaactgggactggagcaactggacatccacatgcaaaaaaatataataataacaataataataataataatttagacacagagcttattctcttcataaaaattaactcaaaatggaacatagatctaaatgtaaagtacaaaactataaaactccctgaagacaatataggagaaaacctagatgaccttgagcacggataggactttttagatacaccaccagagacatgaaccatgaaataactgattatctggacttcattaaaataaaaaaagtctgctctgtgcaaaacagtgtcaagagaatgagtaaacaagccacagatggggagaatgtatctgtacaaaacacatctgataaagcaggggttcccaacctccaggtccagaccagtaccagtccatggcctgggaggaatcaggctgcacagcaggtgaactgctgatgggcaagcattatagcctgagctccacctcctgtcagatcagtggctgcattagattctcataggaccacaaaccctattgtgaactgtgcacgcaagggatctaggttgcacactccgtatgagaatctaatacctgatgatctgaggtggaccagtttcacctgaaaccattcctgcccaccccagtccatggaaaaactgtcttccatgaaactggtccctggtgccaaaaaggtcagggactactgtgataaaggactgttatccaaaatatacaaagaacgcttaaaactcaataataagaaagtgaataaccctgttttaaaaatgagcaaaatatctgaatagacacttcatccaagaagatatatagatggcatgtgaacatgtgaaaagatcttcaacatcatatgtcacgagagcactgcaaactaaaacaagaagataccactacaaatagaatggctaaaatctaaaacactaacaccaccaaatgctgatgaggatgtggagcaacagaaactctcattcgttgctgatgaatggtacagccactttggaagacagtgtggccatttcttataaaactaaacatattcttaccatacaatccagtaatcacactccttggtaggtacacaaatcaattgaaaacttaagtccacaaaaaacccacacacaggtgtttatagcatctctattcataattgccaaaacttggaagcaccaagacacccttcagtagctgagtggataaactatggctcatccaaacaatgaaatattactcagttctgcaaagaaatgagctatcaagccatggaaagacatggaagaaccttaagtgcatattggtaagtgaaagaagtcaaactgaaaaggccacatactgtatggttccaactatatgatattctgggaagcgcaaaactatcaaaacaggaaaaagatcagtggtagtcagaagtttgggggagaacggaatgaacaggtggatcccagaggatttttaggtcagtgaaaatattctgtatgacactacaatggtggatatgtgtccttatacatttgtacaaacccagagaatataacacgaagagtgaatcttaatgtagactatggactttgagtgataatgatgtgtcagtgggggtttattgactgtaacaagtgtaccacttgggtgcaggatgttgatagtgggggagattgtgcgtggtgggggacaggaagtatatgggaactctttgtacttcctactcaattctgctctgaaactaaaactgccctaaaaataaagttattaattaaaaaataaaaaagaagaagaacggtgtttagatcagaaaaaagaagctggaatgttttcctcggctaggtccccttccacgttttggttttggctttgcagtgataggggaatgaaaataggggagaggagaggaaaaggaaaaatgaaaggaatgatccagaagagtgtgtaatgactcagaaaggagggagccaccgcagatctgccagagtactgtttccctgctgtgcccaccttcaaacactataaaggacttactgcaaatgggaaaagacagatggggtcagggttttaaatcatactttaccactgaaggtcctctagtagcttggcattaccatagggggaaagccactttcttactcagagttgtttagtctggcaaaaccatgtgacactctatgctcttttgaaattatgttttcaacttactgtgtcaagcactcttaatgagaagacaagggtcttaagctaaacagatactgagaacaaaagtgtcaaaacagatacagccagatctctagtggttatgagctgatttgaagattttcattagttataccatatagtatcttcaaatgtattacaatatgatattaaagtatacatagtagacacttttcatacttttaatctttctcctgagcactataaaaaatattctaggctagatacagtggctcacacctgtaatcccagcactttgggaggccaaggtgggaggattacttgagcctaagagttcaagaccagcctagacaacacagtgagaccctgtctctataacaattttttaaaaattagctgggtgtggtgatgtgctgtggtcccagctactggaagaggctgaggtgggaggatcacttgagcccaggaggttgaggctgcaatgcgccatgatccagcttggagacaaagtgagaccctgtctcaaaaacaaccaccaccacaacaaactatgaaagcatttgatataattcaacattcactcataattttttttttaaataaaaaacctcttaggaaggaaagggaacttcattagtctgctaaagaaaatctataaaaaacaaacaaataaacaaacaaaaatcctagagtagccatcatacctgatggtgaaatatttaaagccttcctcttgagatcagcaacaaggtaatgatactatcattacttctactcaccactgtactggaaatccatccaatgcaacaaaggaaaaagacaaagaataattggaaaagaagaaataaaactaaaactaacattacttacagatgacatgactgtattttgttgttgttgttcgttttatttatttatttatttatttatttatttatttttgagacgaagtctcactctgttgcccaggctggagtacagtggcattatcttagctcactccaacgtccacctctggcattagggcaattctcctgcctcagcctcccaagtagctgggattacaggggcatgccaccatgcctggctaatttttcgtatttttagtagagacagggtttcactatgttggccaggctggtctcgaactcctgagctcaaagtgatccacccacctcagcctcccaaagttctgggattacaggcatgagccaccatgttaggcagactgtgtttttaaaaatccacaaaaaaactcattatagttaataaaataatttagcaaagttgctgggtacaaggtcaatattcaaaaaccaattatatttctataagccagcaacaagtagaaaatgaaatttaaaaattatttttgcaacagcattaaaacaatcaaatacccaggggaaaaaatctaacaaaatatgtgtaagatctccataatgaaaactcaaatatactatttaaaaaaattaaagaataaataagtgaaaggatagttcatgttcatggattgaaggactcaatattgtaaagctttcaattatctcccaatttatctatagattcagaacaattccaatcaaaatctcggcacttttgtgtggtaattgatatgctgagtctaaaatttataaggaaattcaagaggccaagtggcaaggaaatcttgaaggggaagagcaacgctggaggatttatactaccagatatcaaactatttataaagttacagtacttaaggcaatcttaattggtgcaaaaatacaatgcaatagaagagtaagtccagaataaatcccagacctatatggtcacctggtttatgacagaaatgtcaatgctggggagtgggcaaaggatgatcttttcaataaacgaagcaggtcaactggatatccccatgaaagagataaacccttgccttacaacatacacaaaagtcaattctgtgtggattatggatctaaatgtgaaatataaaaccagaaaacttttaaaataaaaacacactttatcaaccttggagtaggcaaagctttcttccaaaggatataaaaagcacttactgtaaaagaaaaatctagtatatcagactatattgattagaaatatctgtttattaagtaaacgaaaaagcacacagagtaagaggagatatttacaatacatgtatctgacaaggtatgctttagaacgtttacctaaagtactcaatataaaaatgggtgaaagacttgaacaggtactttacaagaaaggatagccaaatggacaacaaacgctttttaaagtgtttaactttttagacatcagaaaaggggagattaaaattagaatatgataccaacacacccaccagaatggctaacgtgaaaaagacagagaatgccaagtaccagtgatggtgtagaagagctagaacactcatgcacttctagtagaagtatagatttctagagtcctgttcagaactgttggcaacatctcctgaagctcaacatactctattattggctgaagcatatagctaccagaaatgcatacgctccttcactaagagacctacaggacaatgttcatagcagtactatttgcaatactgaaaaccatctgaatgcccatcaacagtaggataaatatgttgtgatatatttatacaatgaaacactatacagtaatgagaatgaagtacaattacattcaatagtgtgattaatctcacgaataaatgctaagcaaaagaatccagacacaaaagagtaaacaatgtgtaattttatttatataaaattcaaaactgggcaaaacttaacaatgagttagaaattagaatagtcagagggcttctggagtgctggtattgttctgttttttttttttttttgtctgggtgctaatttcgcaagtatgttcacttgtgaaaatgatttggacatttttcctctaagtatattatacttcaataaaagagttaattaagagagaatgttccatatgggtcctaggagtgggggatgacagaaggaaacatgcagacaaaccaagtaagccaacaaaaactcttccagttgtgttaaaaggattgtcatagaattttaggacattcacttaaaaattattcaattcagaactcataaaacagtattaaggccagccatggtggctcacatctgtaatcccagcactttgggaagccaagatgggaggaccacttgaggccagagttcgaaaccagtctgaacaacatagccagaccgtgtctctattaaaaaataacaaaaagagcaaaaagaaagaagagaaaaactgtattaaaattattcttttttaaaaaccaacacaagtattttaataaactatctgtttttgtaaccagcttccttgcacagtgaaggctaaatacatattcaaccaaggacttcaaatcagtgtaaatggcggaagtaaaaattcaaagggtgtacattttatctaaaagagtgaagcaggctgggcatagtggctcacatctgcaatccagcactttgaaaagtgcaggcagtcggatcacttgagatcaggagtttgagaccaccctgccaacatggtgaaaccccgtctctactaaaaatacaaaattagccaggcgtggtggtgggtgcctctaatcccagttactcgggaggctgaggcaggaggattgtgtgaacccagggggcagaggttgcagtgagctgagacggcgccactgcacttcagcctgggtgacagagtgagactctgtctcaaaaaaaaaaaaaaaaaagaaataaaagagtaagtaggaaaagttttgtttttgctttagaactgatatatttggcttgtatataaggcctattctgctttacaaggacactgtatttttaaacaatgcaggaatttttttccccaaattctgaggcctacgtcaagagtcttgtgtttgggaagttactatgtttggatcagctgagtagtcttttgaggcattccatttaaattaaataaagttgggggttaaatccattcaagctacccatttttttataatgttttctttgtatcaacaatctattttataaaccttgcttcttagaagttaccatcatattttactagtgtgtttctcttttccaaacttcctcattttattttctttggcatttttctttctctatatcttcagctcagtaaatgttcaatcagtaatctaaaaccttaaatcaagatagctaatcacctaatactacgtgcaaggtgtttttcaggccttacaagaaacacatagtattgtggttcttgagaagcttaccaaggtgagagatgtttagtagcagaaggaagtacagagaccagactcgtgatagagatagtaagtactttagaaatgtggaaaagaaagatactaacatgtcctgaaataatcagggatagctttctggtagacatggtgtccaaattatgtggagccattgggatgatcaagatttggatggtcattcatattgaaatcccaagaaaaaggtacatgtccctgtcatcaacgtgccccttatattacatgatattgcttaagaaataatactaagtgtatataatagcaaaggtgatgagattttgtatatggcatatacctgaaaattgagttggtttctcctgagttaactgtttacatatcttgggtaattgtggctagaaatgtgactgtatcaatggcaaacagaactctttgtaaatggcaaagacttctgtgtaaatctggccaacccattatcaaactcactttggctcttattagcatcatattttaatccactaagcaaacttgctcaatctatctaataggtctataattttatttacaaaactaaaggcagggctttaggtaaagtatagataatagtaagataatgtccagtgaacttaaatcaggcatactttattgctaatgcaagcaaaataataagaataatgagaatattttactttttcctaaagatctgacttaaaagacccaaggggagacattatgtctgtattaacttccattttaaagatgagaagaagacagaactgacgtgtttggcacctattacatatcaggcaattaatactttaagtgcttcatatattagatattagctaattaaataagctactcttttttaaacattgctagcaaataagtgttttggatgttcaaataaataatggaagtatcaaaaggtgggtagatttgcagaagaagccagggatttgggtaactcacaaacaaatgatgtttaaattaatattcaaatgatattcaatgaatgctactcaaactaatggagggacacggtgcaaattaactaacagataattcaaaacatatttgtgcctggtttgtagcatatccagtacttggtttgtttatattagcattggttttagaataatatttaacatacactaaaattttgtatttatttgctaaatatattccagtctctgaccttaggagatcagcttggtattaataagtcaacaagacctgattatacttattatgtgtttggcatttgtggaatatagaataaaacatggatcttttcttcagtgactatatgatttggcttagggaatacataaaacaggaaataataccagacagtttgaactcagggctaaattgtgtgatagaagccgtaagtgttagaggattctattctttcatttagcaagtattaatgagcaatactattcaggtatttggaatacatcagtgggtgaacaaactagacaaagatctctgccttcatgcggttaacattccagggaggtgaagcagacagtaagcaatacatagaatccaccaataaattacatggcatgttagaagacgataaatgctttttaaataggaaattgtagagtagaggaggaagggcaatggggaggatatgtaattcccctgtcctaggatagggaaggccaaggtcaccctcactctaaggtaagatttgagccaagattatagggaattgacagaggtggcccagagaatgccagaggaagagggtcctggacaggaacaagagctggggcaggtgcacgaaggcaggagagcatctggaatgtggaaggaacagcaaggaggccggcgtgcttggagcagagtgggtggaagagagagagaagaccagaggggtcagctggggtagggcaggaggtaggggccagacttggacttttgttacaagtgaaatggggaaccactgcagggctatgggtggagtgacggatctgactcacatttgagcatcatctctgtgggtgaccggttgagactaggctgttgtgaggttaggatggaagctgaaaaccccatcaagagactagcagccaggcacagacggtgtcctggactgggctgaaggcagtggaagcggcagaagagagatattctgaacacattttcagtttagaggagagagggagcaatgaacagcaatgaattcagagaatgcttcacggagtagaggttacttgaagctgaccttgaaggacagggacgatttgaaaagatggaagaattaggaaaggcatttcaagacatactaggcttggagcaagggtgggtcggccttactcttgggacaaagagattagtgtgaacagagcaagacaggccaatgcctggaatgtggtgagaaataaggtaaaatatataaaatatgcctggattataaagagctttgaaagccagggaaaaagtgtctagatttcacagcattcactatggtgccttgaaaatcggcactcaataaatattattagactgataataaagataggcattttaggactattggcagtttgcactggatggcaaagtttctcatttagaaggtcagctaaaaggccatataaaaacctggcatgaggtgatgaggaataattcccttgtaggcaattgacagttgactgttttaaatctgctttacagtgttaaccacaagtgccattcaccacttgtgggaacctcgatcttgtgttggcaatcccttgctcaaataaaaattacacggtttaaaacactgtgtactcaaatagccacgtgatcttgattctgaggttataagagttggatggcagttgctatcagttacatgtgcaatttcttcgtctttaaattagttacaggtgcaaaactgcttttaccaaaacaaaaaacaaaaaacaaaaaaaagacaatctggtaaaactttacagaaacttaattccattcaaacgagtctaattcattatcacctatattttcacaaatattcagcactagtagatggatatgaagcatttactggacaacctctagtgcctattttaagcgtccaaagggagctaacaggacagaagctctgtatcacttttgttgatctaagataatgaagaaatttactttgctcagatttcctctgtctcaaggaatatgtacctaacgaaagagctatgaagattttagaaattttcccaggattatcctaacagagttataagtgagaatgctgacaaaaatagtaatatatgacaacctctgtgagaggtatacaattgtttttcatttaataaccaatttttatactgcaattggcagattaaatggatagctgctgtcagggagctttcaagacaagttgtattccttagagatagtaggggaaaataaaattaaaaatgaaaccctgtattttcttgtaaacagctaatgtaaatgatacttctttggggtgtttcctataattcataattttggaggaaagtatgagacaaatgacagttttcagaaaaacagtgattttcagagtttagaaatctacaaaatctgccaagtactggtgatgaaaaaagaggttaatcagagttaagtcagaaaaaaatgataaagctagagccatactcagaaaaaaattaatatggacaagagtaatattcaagaaaaaggtcttgaattctaattacacgtgaaattatggaattcaggggcaggctgcgatggctcacgcctgtaatcccagcactttgggaggtcgaggcgggagaattccttgagcccaggagttcaagaccagcttggacaacatggtgaaatcctgtctctataaaaattacaaaaatttgctgggtgtggtaaggtacgcctgtagtcccagctactagtgaggctgaggtgggaggatcaccgaagcccagggaggttgaggctgtggtgaaatatgatatcaggcctctgcactctagcctgggtgacagagtgaggctctgtctcaaaaaaaaaagaagatctgtgtcaataactcaaatcttttctggacttctacttcagtgtacgaaaaacattataatccaagtttctcaatgcctctgagaagaaaacatgtaattgtcacttttatttaggcccaaagaataacttcaatttcttcacaggaaaatattaatgaaagtgggaaataatttcatcatttaaaaaaattagacacaaagatgctttctctaagtttgatcatcttctcaaaacactcacaggagatcatgcggatgccccgcttcattcatataactgccacttactcttgtgcaataaagagttctgcggtttttgtttttccatatccataaagtgtttaaaatgtaggtttcttttctttttttttttttttttgagatggagtctcgctctgtcgcccaggctggagtgcagtggcgcaatctcagcctcactgcaacctctgcctcctgggttcacgccattctcctacctcagcctcctgagtagctgggactacaggcgcccaccaccacgcctggctaattttttgtatttttagtagagacagggtttcatcgtgttagccaggatggtcttgacctcttgacctcctgacctcgtgatctgcccgcctcggcctcccaaagttgtgggattacagatgtgagccactgtacccagccttttctttttttaaacggagccttctattctagccacaagtgattaacgctacaaggctaaagcaataaattccatatagggctttagatctacttgcacaagtattgtgtcatttaatcctcccattaatcctgtgtattctgttaatatatgtggaaacagaaggccagagaagaaaaatggcgtgcttaaattcacacagcaaatatgtggccaacaaaggactggtccttatattccctggtactacatgggtccctttaaacttctggaaaggtgaaaactttggtcagttatctaaatgtttctgaatatacagttgcctggagatatgtaaccacagattaagtatccctcaataaaaatggcatgcaatcaatcactcactcctatctcaggagagactcgttttgaaggattgtctattgcagcatttatcatgtctctaaggcatatttccattgctcaatcagctccaaaggacaagtgtgtcatcatctttcaaggctctggtgcaacgacttaaaattgtagaattcacacaggactaagtctggcactaaaagcaggaggcatattcagcttgagcttgtggaagcttcccttcaatcttgccaatttttactagtggaaatggtttcagagccagcatgaggttacttggggttgcttgaggagctcttgataaaaagagaaaggggaataatataaaggggtcacagcaatgatggagccttggaaaaagtatggaagtcctctttgggcatagtggctaagtgtagtcgagatttttaatctcatgaatatgaccaatctacctggatatctgagtcattcacactaaatgtgccactttttcttaaatagcagtacccaaccatttgcaacacccccaatttcactttgcctatgatgaggaagaaggagcacctaagaggactactgtacccatgccaaatacctcaactccacagtgttcaactctgctggcctcggctaatgatgatcatatagctaatttatttttaagtctgtctgttttggaagaggtggagtaattatttaaaggtcatttacaaaatgcaataggagtaacaatcataggtcttgggcctttaggagctcacatttttaacagagaaacagtgcttatgaagaagtagtagccagagaccctataagacaagggttaaattattggtacaaaatataatgttttaattgctaataatttcattctgcactatgttaattaggaagaaaagtactggatcattcttttagaggaaattgagactcaaaaaaattaaactcagagtaaattcaaagcataaaattagagattagcacagaatgaaaactaacttgaatcacataaccatcccttaccacaaacagtacttgcctctcagttaacctatttgttgatatttgttgcactgcattctagacatgttctttcaaaatagacaaaactatcaaattttgactcaagaactatttcacagtatagccaggacattctgccctgaggcaggctaaattaataactgaagaaagatagcaacaatttttatggcttgcagaaaaacagaataacaacaatttatggaataaaacaaaactcctagttaagaggcttagatgatagaaatacatgttgaatcaaattactgtaataaaataaaacagtacttcaggaaacattttcttactcatttttaaaaagctttatattttaaaaacggtgactaatatgttcaaacttcaggcttccaggaaaattaaaaggttaaaatgtaaagccatccatttcagcaattaagtgacttaattttaatgctttagcacttatattataaaacatgaatcacactagctaacaatctatttttacacagaatctgagaagagaaaaataaaatgaatagaaatatagacatcaatacgagacaatacaaaacagaaaaggctgtgctaagaaactccagtagaaggagctatagaaatggagaacttatattttgcaatggccaagaaagaaatattgaaaaggaggtatctgattctgacacatctgaagagaagttaataggtagtcacttgcaataggcatttactgttttagggacctcattttctttatgcataaaatgtgatgcttggaacagatatttttcaaggttccgacaatctattctgcaatgcattaggcactatgctaggaagtatcctaagaaatctaataaagagcaccacttggtcctacactctgggaatttacaattctttgggagagctgaagtgcacacacaatacctagatttcaaaatagaacagaaaagagctgagagtacttcaagaggaataaaagtgctgcaagagggataaaaacagttatgagagatctctaacatatgagatgaaaagaggaaaaagtgacccttcaagtctaaaaagcccttatgtattcttgggaaatctatgcaaactcaggaaataaaaatgaacaggattgtttttggatataactatacctttaatgcttaaaattcaggaaatgggagccatgcacagagataaaatagattaggttaggtttccttttttaaggttctgaacatgtttttaaatgaacgcgatagcaacgagctaagcattaaaatactggagtgtacacatgatagtattaaaacaaacacaacctggaagacaaactacaagagcaattttacccttacataaatgcccccacgtccccaatagccgtatctggaaggaactttaccttgtgatatgtttgcagacagtgtatcagtgaaggaatcgctttctgggtcaataggagaatctcccagagtttcacccataacagcatggaataggggtttgctgtaattcacactgatattttgtctctatctagcaaaagatcaatccgttaaaagaaaaagacttgaagtaacagaatttgtgaatacacccatgagtcaagacatcagtttccaaatatttgggagagatgggaataaacacagaaaggactgggcttgaattggctggcactgtcctattaggagccagctgtgacaaaaagttgtgtcataatgttcactgctttggcaagacttggtacattacagggaaaatattgccacactgtctcgccggtgacccacatgttcagtgtcttgtgaggggcgtgaactgtactgtatttagaattatcagagcagagactgttcaatatccacttgcattttttattgttgtaaaattcacaattgcttcttaaatggaaaacttaaatctcttgcttatgaaataccagaaagcttatttgggcaaagttttctttcggtgtctattcctggttgaatctctaatcacattatttgaagaaaaatttggaattcaaatatgtatccatagtttaaacgttggtatcagcatgctactgaaatgttatattcctaaggtacttactctactgatttgtgaagcccaaaatgatactgactgctatctaaattctgtaaaattaaatagctgagagaatgaagaagggtttgatatggtttcaattttatacatcgggtttgctttcttaaaaacttcagcttatccatcaatagcaactgcagcaatgttacaccagctgatgtttgaacatcaattgatgtttaaacgataagtgctatgtcataatgaaaaaatggagttctctatgagaagaataacacaccaccagaaaaaaatagacttacgctgttaggttggcgaggaattgtggtcagttttgtaatcaggaaaaagctggcttcttgctcaaggcctttgccctttttggcaaggagaaatactagctgtgccaaattaccgatgtgggagcaggtcttgtcacatgagtggcctattagaattgcagtgactttgcggactttcaaagacgcccccacacagggcagtatattagaaggcaataattctctgaattatacttatcgtgatattctgagtaaaataaatatatatctggttaatctccattgagtaactattcattcttcaaggggactagtaaaagtgtccctgtcaatcatggtgcaagagcctgatggggaaatgctggctgggtctgaacatcacggaataaagtgggggagttgagcaactgtgccattaagccccaaaacatctttattaaggcaatccaagttaaagcaaaacttgggtttgctaatttgtccaaatgactacagtgattacagttgtgtaaaattagttttctctatattcagttgaattctcaataaaggagcttctcctttcctccccatgcttggaaatttacttatactacaaagtaatccagacacgatggcacaatacttaaggatatgactgaattgaactcaagtcctataccagtctctgttactctttggcaacacacagatgcagtccttccacctgtcctcatgtcctcaaagggtctcacttctggactcttcatctactgttacttctattctcttttttctcagacactattcaacttctgagtctagtgggtagtgaggccttctaagcctctaatagttcccatactgtgctttagcttctgaaacataagattacatattttaacaatttattattccatagcatcagaatctgataacacctactcctatagcacccaccacattctgacattccgtcttcccccagactatgttttacttgaaagcgaaaacctgtcttactcattacatttcatgcatttgtttgttcaacaaatattcattgccaatataatatgtggcaagcctaaagctaggtgctaggtagacaatgatgaacaagacggatgtgtcaaaaaacagtcaattagcaaaaactacaattttaataaacacagggcctgccacatagcagctcagtaaatgttgcttacacttttggcagcatacacaaaccaagcaacacgcaaagcatccctacattactaacaaaacagttatacaatgtggattatttaatcatattttatgttaatgatagttgcactgcagtgctgggtcacttaagaaataacttgcttacatggacattcaaatgaatgaaaataaagatagatgagccaatctcatttgtatcttattatgtatctgttttgtctttagatactgaaaagacttatttccacatttattcatcccatcattcatcaaatacctactaagcaccaggtactgacctaggcttaggtggtaaataataagccaaggtttctatacttaatgagttcacatgtaactatatcaaaattatccaaatatacttaaaagagtgatcttttcattggcttaaacttgaaggtcaattggcatgcaatgatatgagaaacaatatatttgtttaagtacagtcattactaccagtaaacagtatatgatcatcagagaatttataagacatgcacgtgactatccctatcttcaaagccttaagattcccccagtgtcctgccctttataatactgattggaaggatattacaataagatacataaaacagcatgctggtgatttacatgataagatcttagaactttagatcttgcttagggtgctttgtacaccaatgggttgtcagcactttgcacgtcaatgcagcagtctattgctattcatcctatggatggtccccttgcaggatagtccttggtaatgttacagagtgaggaggagtggtaaaagaccactttccttatgcactatgtactccttctgttgagggatgtaaggttctgtgcaatgtagaggttgagaagagggccatctctcctaggactttggagacagaagggtatggatgtgactttgagtacaccaccacatcctcagcaggagaaagaatggggataatgaggaatgattctataatgaggaggatgaaaacttaactctaccccagttcatgatatttgaaaaaattgaccgcttggtattagagaaagctactcttcaacatttagtcttcaatattacttcacagaacctgtctttggctacaagaatctgaatattactcagccataaaaactcttcacactttggtacttttaggagaaggcaattcaaccaataaaagctgtgaatgattcaataacaaaaagtaagaaaaggtctaaaaatctatagttaataaaatcatggtattgaacctatataaagttatttttagcattacttggtgttgggatgacttacataaaatattcccataatatagaatattaaatactttggagcctgcattattcttgaaagctaatgaaaacttcactctttttttgctataaatttggaatttattctctagaatgaatatgaatttttaaaattgcttaaatagctttttcttttgtgtgaaataagctatgttagtattggtataaaattgtatgtacagtatttttttcttttgctataacctcatttaaaaatctgcttcatttaatgctgtaagtgctactaacatttatgctagcttctaaaaggttaagcatttagatctcattgcatccctagaacctagcagagtccctggttggcattaaaacacacatattgtttttgttgatgatgagagtaatgaaagaacagcacatccatatcacatgtatcattcaagaaggagtttagagacctaacgaactgataatagcatccattttcttcttgtttcaataagatgtaaatttctggatgatgctcccacggaagccagataattgctaacaaccagaatgaccagccaagctcacttctccccctacccaaaagaatggctgccttttcctagtgcaattcagattggcttggaactttattttcaagtggtggttgcatcagttcagggtttcttcatagtcccaggggagagacaacatgagagaaatgctgggccaatgggacactcctttgagaagaacaaataatcctgtatcctggatgtaaatttcaccacaaccatcacaacaagccggatagtcccataaaagcagacaaaggaaggtcaatgttcaatgtatctgtgccccttttggaaaattttttaaattaaaaaaatttttgaccggggtcttgctatgttgcccaggctagtctccaactcctgggctcaagtgacccccctgcctcagcctccagagcagctaggatttcagttgctcgccaccacactcagctgtgtctttttttttttgagacagggtctcactctgtccctcaggctggagtgcagtggcacaatctaggctcattgcaacctacctccacctcccagattcaagaaattctcctgcctcagtctctcgtgtatcatttttttgaaaggcaaatccattcttctttaaccaaaaactgtaattttgttcagattttcaaaagtaatatattttatggacataattatattaaacaattatattattttgatttaaaggaaaataatgctgctaggtgcaatggctcacacctgcaatcccagcactttgggtggctaaggcaagaggatcccttgagcccaggagttggagaccagcctgggcaacagagtgagaccctgcctctataaaaaaataaaataattggccaggcatggtggcatgtacctgtagtgtcagctacttgagaggctgaggcaggagggatgcttgagcccaggagaccgaggctgcagtgagctgtaatcgcatcactgcactctagcctgggtgacagagtgagaccctgtcttaaaaaaaaagaagccaataactccagtaaatgtatctttggtatcaaaaaaaaaaaggtcttcttaactcagaagcagtagaaaagaacactgacattggagccagaaagcctaggttttacgtttttgtcttggctcagccacaaacctactgtgtcaactctttgggtccacatttctcatctctagaatcagaaaaagccctttccacaaaacagaataatccttaaggtctttttgagttttaatgttgagatactgaataatatgactgtaattcatttatttaaaatttaatggaaattctccatattgcatacttattcatgttctgatcctgagttactatttccttttcatacttgactcatacctaggtgacagtataaaaggcactttcatctgaaaaaatagtgtctgatgataaattaaaagtctcaaaaggaaaaaaccaactgaaaacttccttttctgcccagcttcaaaagttaacttccctctaatacctgaaaaagagactaacctgtttaaccactttctagggatcaactaaacacttttgaaattactgtaactttgaaccaaagacgtcccacctaaactatgttaacttgtcgttgcatgtaatatctgaaattctctagtaagctgttttctagcatagtaaaataccatgaactatattatcaactgacacattttcatgttgtgggaaacctaaacctctaaaacatgtatctttttcagttttcagattttatcaatgaatttttcaagatcagttatatggagatttattgggtagcacatcctgtcactggtgaagcacagtgggaattcacaaaggttctacagcaagcgtagagccgcggagctgcactcagtttcagctggtgtcacttaccagttctgtgactgtactaaaggaaatttacgtactgttgaaatcacgggctcacgaaacttaataggagggagattagcatattccaactcttaatttttgatataaggaaaatgggttccagaggaatgaaatgatttgcccaaagcatgacctagataaattagcagcagagtttgagctagaaaccaggtttcttgattcccagtccaaagctccaaacgatgctctatctcattaaaatgatgcagtaagacgttcaaatcagttcttcaggtcaatgatccttaatgccaacagtcatggtggaagtcatcagcatgaaagcatttttctatgatgaatcacttaatgtggaggaattacctatgaaaatgtcatcattcaccacagggtttagatatggtgctctctacaaagtaagtactcaattatgactcggtaattaaaatttgataatatttgaacatcagttcacggagtcattttgctgacgaatgttctcttgcctcattcacagattcttcatgagtcatcccagcattctggggttcttctggtatgatgtttttgtttctattgacaaagttccttgctcttaagaaaatgataacattactatttgaaaatttctactttgaggtaacaatactctaaaaaaaaacaccttggatctgtatagtgtttttatttcgtttgaaactcacaacaatgctgggaggttattcaaagcaaaagaagaaaataataacaactattgaatagggtttcaatgtggaaccagataatagtttttggcagtaaagctttgagtaatttgtctttattcaaaatgaacaaagagtcaaacagacctgggtttgcattcaagccttgtcacatctctgttttcttatcttttcggagttgtgagaattagagatgatttaaataaatcagcgtctggaacagagtaggctttcaaaattatattatgaattcttataatcaaatatttaaatcttacatgacactttaataaagcaataagagcagtcatcaagcaacactcttatcgctcttatgttaacaggagctacataaatacgcttcaggaagagacggtatatagagtatggaatcttcaaaagcaagtacaaatttttaaagttcacttagcggaagtagacatattttcttcacaccaacaaatagatatttgactgaaaataaaatgtaactgtgaaatcagtacataataaacttaattttgatggcaattaaaccacaggcaacacagagtatattttatgtttattttccggtaagattcatcagtccattaatagtagattggttcagtctaaaagtttgtctctaacaatctttattagacacattataaattctttcccaatctagaactttacatttgaacttatagaatatatcttaaagcagcattagtaaaagtaagaagacttgaaaatataaactagctttaagtaagattcagattccacatttattgagtgcctacgctgtcaggggctgtgctaagtcttttaaaataaaaatttgtctagactttataaaaattctgtgagattggctgggcgtggtggctcacacctgtaatcccaggactttgggaagccgaggtgggtggatcacctgaggtcaggagtttgagaccagcctggccaacatggcgaaaccctgtctctaccaaaaatacaaaaatgagctgggtgtgatggcacatgcttgtattcccaggtactcaggaggctgaggcacaataagtacttgaacttgggaggcagaggttgtagtgagccgagtttgccccactgcactccagcctgggtgatagagcaagattctgtctcaaaaaaaaaaaaaaaaattcggtgagattgaatggtagccccatttcacaaaaaggaaacaagctcagaaagaatgagggtgatgttatgattagataatgggctgctaaataccgagcaatacagttaagtatcacataactagggatagaataatataaataagactgagcatcaattctcaagccattttcctacttttagtaaagaggataagacaagcacaatgcactctaatatacgagtaggtggtttgagagaagtgcaaacaatcatgaccattactagagtaatttctgttgagctatgtattctgcctctactgcagtactcgccactgacttgaggccctcaaccctgcgaagtcatttattatcaccattttacagataaagaaattgagttttgagatcacatagctaataagaggcagagaagggatttaaaccagatgcaatggagtgcgaaagatattcagagatgaacagagcccttctgactgtgcatggagatggaaggaatccaaaaagccttcaggaaagagaggaaatctgagatgagcctgaaagacagagaagctttggatggcaggaacaaggaaagggaacagagtgaagaaaggcaagactcaaccaagagagaagagtgagaatgaacttggggaatgagaatccatggtattgggcacctgtgggacgttttgggatagaaatttccaagggctactaggcagtgatttagatcaacacaggggagccaaaaacaacaaacgtgtcttagacctactgtttcaggctggcagagttctgtgtgcacatcattaaataatactgtacgtgtgtaggataggataaaagaaatctctttagtaaagatactgaatttcaaatgaagtacaatacagtttacatatgttaaatctttgtatttgaaagcttggtggtttttaaagatactagagtgttttctagtctttatatcttctttcctccaaggaaacattttcattttccttgaaggaaagaatacactgctgcttttctatctgaaaaggtaggggtttttttgtttaaaaaaaaaaaaccacctttcattattatagaaccaatccgcgttcattgttaaaaattagaaaatacagactggtaaaaacaaaatgattatacttccactaccagatataaccaatgttgaactcttaaagtttatgcatctgggtctttttctgggcatatgtatgatcatatgtatatacagatacataagcacatacacatatacacatacatacagcatgtgtattttttaatcaaaatgagatatggtacttcctggtagtcctctgctttttcaagtcaataatctccatcttttcatttaattacattttcatttcaaacaatacccagcccatagtcacatttccccagctgaccccaaatgttctttatagttggtttgctccaaccctaatctaatccagtatgatgaaatgcatttggctgtatgttcctaagctgttttaaatctagcatgactactccttccccttaattttaaggccactgactaattgaagaggtcaggccagttatcagatagaatgtctcaacctctgaatttgtctggttgttttcttgttgtatcatttagcttgattctccatcccctgtgtttcttataaactggacactatatccaaggatttctggattcaagttaaacattttaggcttgaatataccataggggatgtgtacttcctattccatcacatcagaaggcaaaatatatgactgaccatcagccatggtaaaatctaccactaagttagaatggtgatatgtctcatctctccattgtacagttactttttctccttcaattagacagtcatcagtgcaatgttactttggtattacaaggatgttcagtttcattaatcattcacctaaaggtgtaacaaactttatcatcttttcctgaatcaatacttggagtttatgaaatgtttttctaattccaccactctttccacatttattagtaggaaattttttttctttttttgagacagggtcttgctctgttacccaggctggagtgcagcagcgcgatcatagctcaccgcaacctctgactcccaggctcaagcgatcctcctacctcagcctcctgagtagctgagaccacaggcgcgtgccacaatgcccaactaacttttgtatgtttttgtagagatggggtttcaccatgttgccaaggctggtgttgaatttctgggatcaagtgatctgtccaccttggcctcccaaagttctgggattacaggcatgagccactgtacccagacagcaggcatttttctataaggaagatctttccttcagcaactaaagccatgtaattaccctgaaatacagttcctacaagaaaggaagactgcttgtttaatttgttctcttttattaaaaaggtaaatatcttcaacaccaaacattcctaggcacatctctttcctctgttcattgaatgttcacatcataaaacacttacatatctaagtttttctttttcagctatttttagagaattttatttcaaattcatctttctccattttccttggccctatggacagttaacgggacacccatcccatggttcttcaaatatctaatctttttttttttttgagacggagtctcgctctgttgcccaggctggagtgcagtggcgtgatctcagctcactgcaacctccacctcccaggttcaagcgattcttctgcctcagcctcccaagtagctgggactacaggcatgtgccaccatgcctggctaatttttgcatttttagtagacactaggtttcaccatattggccagactggtcttgaactcctgaccttgtgatccgcccgccttggcctcccaaagtgctgggattataggtgtgagccaccacgcccagccatctaatcctttttattgcatatacaaaaccacttaccaacccctaataatataacttatgctttggttttacccgatgatttccaccaacagattttcagtgtttagcaggtagttattcctaaattacagggcatagttagaatacaaacttaactggttcttccaaagttatgttgtatgtctgcatagctttaggaaaagagtccaagattcctgacaggtttgtggactaataaaccacattccaaccatctagtttattctttatactcctggagtgcttttcttcagatacctctaggaagtaagatgttacatttttatttttaaaaacacggcctctattttaataaactttttatttgaaactttggaaacattttattgaaacacagagggaaggaggggatgatgaaaacttggacaagaagtaacttttaccactctaaagtaagcacctctcccccgcaataaaaataaaaataaaattcagacttaattcagtcctcctcctaattatatttttgttatctattgcacacagtcagatgaatagctcaaaatgcctacagcaactctgggcaagttgacaaatatcctacacattgaaatgagaagacggaaggaggcagattgcttaattgttacttgggaattcagggaggtggacaagccaaaatctgtacagggatccaaagagcacaactccttccttaggcagcaggagaaaacaatgggccaggttctcattctgtgtaatctcataggatggttccattgtatagcccattgtttcttccatgtactgcctgaaggggaagtatattgttatctatgggagagcttccataagagagttacataggatgagaaggtagcctctgggagattaatgagtgatggggagccagtcttgtacggaactttcagatcaacactttgagaactgtgtacctgaaagacctatgcagtaaggtcaggaagcttgcgtgagcaagaattagtcagacaagcaatatgccacatatgccatgctgaataaaggggctttgttagagtatttgagggagggggaatcattaggaggtagagattcacagataacagaaatgtgaggatgcgactctcatgtgtgcaagaaatcctggagaacatttaaactaacaccctctttacagatggggaaaccaaagcaaaaagaggttaagtgacttgcccaggccttgcccaagtacagtcagtgacaaagtcaaagctagaatccacgatactgtagttactggatccattctttggttccactaaaagtattttttcagctgtgtcttctgaccttggaagggtcaagggcgaaaatatctgatacctaaatattcttaggagatctagaagtcttcataaaaagcttttaaaacagcgttattgatgcatattttacatagcataaagttcaccattttgaatgtgcaattcaacgaattttagtaaatttaccaagctttgcaaccatcaccataaatcagttttagaacattttcatcacctagtaagatctgtcatgctgatttacaatcaaacgccaattactacccccaatcccagacaactgttaatctattatacttttctgcctctatagatttgcttcttttattagacatttcagataaatggaatcatatgatatatggtctcatgtgtttggttttttttcacttagcataatgttttggaggttccgaggttgagtctggaggttcaggttgtggcatgtgtcagcagttcatgcctgtttactgctgaactgcctagattaggctgtgtattgatacagcacattttgtctatccattcagctgatggacatttagattgtttccgatttctgaggaaaagtttttaactctgttttcaattttaccttaattttaatgacataaaatgtataagaattcatattttagattatatgtatgattttataactgaatacagacaagcagtttcagtgccacagtttctacctgtgatttcactggtgcccaatatcacaactttagttgtctaaggttagtgaaagaagaacaaaggtaaacttttaatatgtaaatgattcatctgagttaactgaagttcaaactagatccagtaatactgtagaaaggaatgtttcacagaagagttgaaaaagaaaaaagtcttggaaaaatttaatcagatatggcattaagcagcaaaaggtgttgaatccccaaaagtatatgctatagcagtaatttccatatttgtacctttaatgttaagggctttacaacttattttaaaatttattttggttgtgtaaatatataagagctataaacatagtttacaacttgttttacacatatttaagttacatttaatacaaattatgtgaacactgagaatcataagaaattttttccttgaagtctgtgctgtactcaagcaattttaagagagagatatctatatagtaataaaataactgaaacaatttaaattctgtcataatataaataaagacaaaagaggagacataatttgtgcaaaaatcacacagccaattagtgacagctaggtctaaaacacagctcatcagtgtcatggttacaaaacatttattacaagttgtatgttgttaatctcattgagcctttcatcattttataaacaagacttttattaaaattgagacacgaaacagattcattttctaagtcatactttcctacctatgcctgaataatgattgccttccaaacctttagtttaggatctaagatctggtattcacagagttggcatggggaagtgaaatgttttagctaactttaagactgaagaggcagaaggatatatttatttgtccttccttattcatgaaggattggttccaggacgttgtggatacaaaaatccaagatgctcaagtccctaatctaaaatagcatagtatttgaacataacctatgcacattctcccatatactttaaatcatctctagattatgtataataactaatacaatgtaatgctatgtaaatagttgtttataccgtattttacattttctatttttaattattgtattgctatttttatttatttttaaaaaatacttttgatccatagttggttgaatccatggatgtggaacccatgaatgggggcaggggtgggagcaactgcaaatggtaaaaacagaagagccaggctcgactttcagctccgccactaactcggtttatgaattcaggcaagtcgcaacagctctgctcttaagtccccatttttcaagtggagatagggaaaggagagtagattagatggcttctaagattttctttgagctcttcgtttcatgaattttaagtgttaaaaggaatcttccattataaactcttgctctattcagaatcagcctaacctttgcataggttaacaatattattgctatactctgcccacacacccacctgtcctcccacttttttgttccctatttcctaacacataagttctactcagaacaatgtacctactcactcctatgtgcctatagtatacagtaagtcctcaagaaatactgaatagatgcattagtgtagaaatgaatgtatatattcttattttctgccatccactaagacttgtttctggcttcctgatctttcttatgctgtaacacaatgagatatttctattggttggcacaaattaaatgctctttgaatgccaattcatcctagtaactcatagagtcaataccacataatttagacctgatctgtttcacgtatatttgttttatttccccaagtatattattaagtcatttgaagacatgaaaagagtatgccttctagttcatttataattcttagcgcagcattaggtgttcaagacttgattgattgattgctaaactccaaacagacaagctactgtatttttaaaggccttcaggagagtaccctattcaaacttaaatgtccacaagaagctcagcccccttgctttactttgagaagaggttgtaagaaagatggttatcactctttgcataatgtctttataaaaacctaaaggcctttgttcaaatattcttcttccttaccttcttttcccagctaaataatcagttgctcataactagttcctgagacctgattcagttttcagtactttaaacaaaataaaggcacttaactattattaaaaaataatagctatcaaatctggaggactctaaaggagaatctatccacagcaaaccttctagagtagataaaattaatttcagagtagattattaaggtaatcagcagggatgttcagctaatctttttcaaagaagaacaaagttatcaagaataatgtaaatgtttccatttttctaaagaactattatcttccatctttttttttctctgaagtgtttctagtagatgtcagcatcactagtcctcaaagagtatcaagaggtgaaaactcacaacatggaaaacctcagacaggaagcttaacgttagtgttgcataaaagataccacaaactcctgacctggttatcctcctccccacaactccccaagagcaaccagcattaatctgatgtatcttgtgatgtttagaatgtgttcgcaaaccaattctcatcttattacggagaattcagatcagcagcattttggttccagcactgtctcaactggagtatcattttccctttgatacattctcataactcccacttcttacccttcctaattaatgtctctgagataaagagattaaattaagatgggcatatacctccttacccaaactgggacacttttaagagtgaaagagggcactatcaaaaaatcacactaggacaacaggcataaaccaggactgtcaggcaaaccaggacataccatcactttaagattaagcaaggtaaggagatttagaaaggacagtggtgtcacgacgtctttggtcctggcaactagaaactaggtcagtgctgccattcttgttttttttttttttccccacattgccttctacttctaatgattagctcattgatgtaggaatcatattaatacttttattggaaatctgtaattagaacgtggtggggtgaattttctttgctttgcttttcttcttctttttccactgaaggttcacacagggcagctgttttgtagagggtgagaattgcaaagtttttgccgtaggctctcttgcattaagaattgttgcatctggccacttttcaagcaaccagatgtgaaataagtaatgcccgtttcaattacaaatctcattttaatatctttcaacataaacaacaatagtcaatttgtgtatttcaaggcttccaagaggtgacagacattcaccacacaggaaccacactctaaaaatgctagagaaaataagtatcctattaaaaatatttttaaatggtcaaaactgcttatttcaatgaaggcagtaaaataaagcttgatttgatgactacaagtaacacagtaacaaaacctcaaataattcaatttagtaaattctgaacactttggaagtcttaaccataagccttagctattgaaatgattatattctggaattactaccaactctgacaaggtctgtaaacaccacctaaggcaacacatgctttgatggtaccagtgctcacatattatttgcagagtattcagagctctaatacagactaaaaatcatctcaatagtgaattcctaacaacgtaccatttctacccatctgaaactgcaagtaaatgcattaaactaccttacaagaaaattaacagtaatttctattactcccaattttgcaatctggatccattatgatgggccttgtgactcatcacaggaggccagtctgaagacagttcatgctacttaaatccgtagtcgtaagtaaaagttaagtatgggaataaacaaaataaagaataaaaaattagaaataaacttacagcaaataaagatgttaaaatgtattgacctagatggtaggataacagagataaaagtatataatgtgaacagctgaagtacatgttggtacataaagtgtctactggaacaatgcaggacaggggggctttgactaaaaagtataaaataatcagtaatatttgtatagtcttttagagttcacagagcacttttgcatatattatatatttcatcttgagaagtaggaattattcccattttgttgaaaactgaggaggttcacagaagctatgtaacttggcccaaatcattcaaccagggagtaaactctaaacttaaaaatttaacccaagtcagccaggcacggtggcttccacacctgtaatcccaacactttgggaggccgaggagggtggaccacttgaggtcaggagttcgagaccagcctggacaacatggcgaaaacccatctctactaaaaatataaaaattggttgggcatggtggtgggcacctgtaatcctggctacttgggagactgaggcacgagaattgtttgaacccgggaggcagaggttgcagtgagccaaaatcgtaccactgcactccagccagggtcacagagcaagactctgtctcaaagaaaaaaaaaaagaaaaaaagaaaagaaaataaaatttaagccaagtcaacaaacttttttttagtaaatcaggtcaaaaaactttgctatttaagagacactgtgggaaatattatacaaagaagtataagcctgctcttaaggaacttgtaatcttctgggagaaagaagctgcaaagaggtgaaaagttaagtaatgatacatgatttgaattaagaattgcatccaataatagaagaactgtcacaaagcagcacctagttaactgccagataaatgtaaaaaagccaaagtttcacagggactcaaaaaaactcgtcaaaatgggatggctggggacaatggcttcacagaagatgggggcctgtatgtggatcctaagagtacggccttttgaaagacagcaaccatgcagctaggttatttcctatctgcgtcactcaacagaacctcagtcactaatgtcgtatgaacaaagtctgttgtctgactaactgacgaaatgactgacgactgaatgaacgagcacacagaaaggaagtgtggagccttctagacgaggtagggggcataagcatgatgggggagagtgaatgtgaacctattactgtgctttaccatagctcagaacgtggcttagccaaggttccatagcgagatggcacagctgaggatcactcgagcccggtaggttgaggttgcagtgagccacgatggcaccactgcactccagcctgagcaacagagtgagactctgtctcaaaacgacaacaacaaaaacacaggaatataggtctcctgactcccagagagatacagagatggaaagagaaagaatgatggctataaaattagatatactcaagctggaagccctacattaccacatgccagtggtgtaactttgggcaaagctatttaacctccttctgtttcctcagttgtaaatgaggattgtggtgatgaatataagaaataatattaaagagaataatgtaaagcacttagaagtgcttggcatacagtaagttgaaatactagcttccttctccctgaactacatttaaaagggtgtttttgtttgtttgtttgtttgtttttacaaggcccactttggtattgctaccactagaaagatcacctatgcagttggctcatgacttcatttactcaaacctaatttagatgtaacttttcagaatttttatttttagagacaggatctcactctgttgcctaggttggagtgcagtggtgtgaacatggctcactggagcctggacctcccgggctcaagcgatcctccctcagcctcccaagtagctgggactacaagtatgcatcccaccatgcccagccaatttttaaaattttttgtagagatggggtctcactatgtttcccaggctagtcttgaactcctgggctcaaacgatcctcccaccttggtctcccaaagtgctgggactataggcctgagtcactgctcctggcctttggatggttctttactgtatacatgtctacttgcaatggtagtagaataattttgaaatcactgccctatatatggagtcagtgatcagtaatcaaagacaatctatttggatgacattaataatgctgaggaatgtactgatatacctaggcctctgggtggcattacataaaaatccacatattaaacaaaaacaaatgccatataactgtgattaactattaaaaacccttaacacactgaaagttgttcttctacctttagaacaaatgggcaaatgctaagggagaaaaggcagtttaaaagttatttatttttaaaagcagcttccagagcacttcctgggataatcttcaacattttttatatctacagtataatgttatttgctactcaaaaataaaactaagattctaaaagttcttgaatcatcaattcagggctatctaaattcaatttaaattttatttcaccctatcatatttaccaagacagaaaaatggcttaatatgttgaagaaagattttacacaggcagaaataaaaagggctttttggttgattaggttaagcagaaatttaaatttagttttgccaagaacaatgtatacactgtacattccagttcctcatcatttcacatgactagattctgggaaaggaattggaaaaaatgcttaatttgacaaccattagtatataactatctccacacatatagtttcaagcactatggatatattaagaccaaatttatatctctgcctcagtcctctagtctgaaccttgacactacatagaaatatctatttggtaactccattgaaatatctcacaggcaactgaaactcaacaggttaaaaactccattcatcctctattccctaaaactggtcctccttcaatgagccctgtcttagtaaatgctgccaccaatctcccagctgatcattgccaaaaacagggagtcataattgaaggcccagacatccccatcaaaccaatcgccatgtccttttaattctacttattaaacatttacattcagccacatgcttcagtctcttccacttaccaactggaatccaaagacactctcttcttccatatgcacctttccatagcttcccacctggcgtcctgtctgccatccttgcctctccaatcaattctgcatactacagccagcatgatgcaaatcaggttatgtcactcccctgtttaaactctattttgacttttgattgtcttaaaccctgaataacctagttcttgcttctctctgaagcctcactggattccttttctccatttaaatcagggagtaaactaagctgtttcccacatcacagccttcacatctcatttcctccatctgtaacatggttcttctcacaacccccttaaggtaactccaattcactcttcaactatcggcataaaaaccacctcctcaaactctcacagtaacttaactcatcctatgcaactgctctcattctacacaactcatactgccatttctctcccttacagcactcatcattttagttaatacttgttctttttctgctttccccactacctgtagacttaatgaagacagaatcattgcaagatctccacactagtaacaaagaacactgagaaaagcttccaaagatgagttttagtgttggttttaacttgctgtgttatcttaggcaagtcacttccatcttactaatgtaagaaaacagtctcattccaggaaaatgtccttgtattgtgaaatgtgggctttctaatgaccttttagattattgatataaaaacagattattttaaaattctaaaactctcagagcccaagaatatatttgtggatctccaagaatctgtggatctcagtttggaaaagagatggtctcttcaaggtgtaaaatttctcatcattctgagaaaatggattttattttctggaatacttcacagtgaatcacaccctaaatgtgagcttgttaaatgagatttgggagagagtacaag

SEQ ID NO: 47 - DNA, 182328 bp, Homo sapiens
gaattctatgcacatacattcaataatttagatgaaatggatgaagccctcaaaaatcacaatcaaaactcactcaagaagaggaagccctatagctattatagaaattaagtctataactttaaattgtctgaaaaagaaatctccagaatcagaatttcactgttaaattatatccaccatttaaagaagaaacaacattgattctgtaattgctttcagaatgtaaaagagaaaggatcacatcccaaattattttatgaggccagaattatcctgataccaaaaccagagaaagacattagaagaaaagaaaatagaccaatatccttcaggaacatagacacaaatcgaaatcagcaatagtttttttttttttttttcattatactttaagttctgggatacatgtgcgggacgtgcaggtttgttacataagtacgcacatgccatggtggtttgctgcacacatcaacctgtcatctacattagatatttctcctaatggtagccctcccctagcccccaccccccgacaggccccggtgtgtgatgttcccctccctgtgtccatgtgttctcattgttcaactcacaattatgagtgagaacttgcggtgtttgattttgtgttcctgtgttagtttgctgagaatgatggttttcagcttcatccatgtccctgcaaaggacataaactcatttcatatttttatgactgcatagtattccatggtgtatatatgccacattttctttatccagtctatcactgatgggcatttgggttggttccaagtctttgctattgtaaataatgctgcagtgcacatacatgtgcatgtatctttatagtagaatgatttataatcctttgggtatatacccagtaattggactgctgtgtcaaatggtatttctggttctagatccctgaggaatttccacactgtattccacaatgcttgaactaatttacacttccaccaacagtgtaaaaagcgttcctatttctccacatcctctccagcacctgttgtttcctgactttttaatgatcaccattctaactggtgtgagatggtatctcattgtggttttgagttgcatttctctaatgatcagtgatgatgagctttttttcatatgtttgttggccacataaatgtcttcttttgagaagtgtctgttcatatcctttgcccactttttgatggggttatttttttcttgtaaatttgtttaagtcccttgtagatcctggatattagccctttgtcaggtggatagattgaaaaaattttctcccattctgtaggttgcctgttcattcttttgttgtgcagaagctctttggtttaattagatcccatttgtctattttggctttggttgccattgcttttggtgttttagacgtgaagtccttgcccatgcctatgtcctgaatggtattgcctaggtttccttctagggtttttatggttttaggtctaacatttaagtctttaatccatcctgaattaatttttgtataaggtgtaaggaagggatccagtttcagctttctacatatggctagccagtttccccagcaccatttattaaatagggaatcctttccccatttcttgtttttgtcaggtttgtcaaagatcagatggttgtagatatgcagcctggaatactatgcagccataaaaaatgatcagttcatgtctttgtagggacatggatgaagctggaaaccatcattctcagcaaactatcgcaaggacaaaaaaccaaacaccgcatgttctcactcataggtgggaattgaacaatgagaacacatggacacaggaaggggaacatcacacactggggcctgttgtggggtgcggggagggtggagggatagcattaggacatatacctaatgctaaatgacgagttaatgggtgcagcacaccaacatggcacatgtatacatatgtaacaaacctgcatgttttgcacatgcaccctaaaacttaaagtataataaaataaaaagtaaaaaaaaagaatgtgtaagcaaaaactcagttgtgtgtaagaaaacccaattgcccctaaagaagagaaagagctggagtccttaaaaattaactgcctgtttttctgtggctagtaaaccttctctctccctttcccaggcattgtgaagactgtttctctagctgtgaagctgcaaggtcactagacagataatctcaagtcgtaaaacatgtgttccttgaaaagtaagaaatgatgtaatgcatgtcttaattgaataactgtctttgtttctagcttctgtctccccctgccccatgaaatgcttaaaaggtagcttgactctttgttcaagctcagtcctttggatgttaatccaactgggtcagtgcactaaataattaaataattcctcctaaaaatatatatatattgttatgtgtgagtctgatcctgtcattatgattccagctgtttattttgcctgttagttgatgcagtttcttcatagtgtcgatgatctactatttggtatgtttacagtggccgtactggtttttcctttccatgtttagtgcttccttcaggagctcttgtaaggcaggcctggtggtgacaaaatctctcagcatttgcttgtctgtaatggattttatttctccttagcttatgaagcttagtttggttggatatgaaattctgggttgcgaattattttctttaagaatgttgaatattggcccccactctcttctggcctgcagggtttctgcagagagatctgctattagtctgatgggcttccctttgtgggtaacccaacctttctctctggctccccttaacgttttttccttcatttcaaccatggtgaatctgacaattacgtgacttggggttgctttctcaaagagtatctttgtggtgttctctgtatttcccgaatttgaatgttggcctgtctttctaggttggggaagttctcctgggtaatatcctgcaaagtgttttccaacttggttccattctccccgtcactttcaggtacaccaatcaaacataggtttgttcttttcacatagtcccatatttcttggaggctttgtttgttccttttcattcttttttctctaatcttgtcttctcactttatttcagtaagttgatcttcaatctctgatatcctttcttctgcttgatcattttggctattgatacttgtgtaagtttcacaacgttctcgtgctgtgtttttcagctccatcagggcatttatgttcttctctaaactggttattctagttagcaattcatctaaccttttttcaaggttcttagtttccttgcattgggttaaaacatgctcctttagctcagaggagtttgttattacccaccttctaaagcctacttctgtcaattcgtcaaacttattctctgcccagttttgttcccttgctggcaaggaggtatgatcctttgaaggagaagaggcattctagtttttggaattttcagcctttttgcgcaggtttttcctcatcttcatggatttatctacctttggtctttgatgctggtgatgcagatctctcagatggggtttctgtgtggatgtcctttttgttgatgttgatgctattgctttctgtttgttagttttccttctaacaggcctctctgctgcaggtctgctggagtttgctggaggtccactccagaccctgttttcctgggtatcaccagcagaggctgcagaacagcaaaaattgctgcctgttccttcctctggaaacttcatcccagaggggcacctgccagatgccagccagagctctcctgtatgaggtgtctgttgacccctgctgggaggtgtctcccagtcaggaggcactgcggtcagggacccacttgaggaggcagtctgtctcttagcagagcttgagcactgtgctgggagatccactgctgtcttcagagtcgacaggcaggaacatttaagtctgctgaagctgtgcccacagcaaccccttcccccaggtgctctgtcccagggagatgggaggtgttttttttgttgttgcttttctttttgtttgtttgtttttgtttgtttgttttttgttttttgtttttgaaacggagtctcactctgtcacccaggctggagtgcagtggcacgatctcggctcactgcaacctctgcccctccaggtttaagcaattctctgcttcagcctccagagtagctgggatttacaggcgcgtgccaccatgcccggctaattttttgtatttttagtagagacggggtttcaccatcttggccaggctggtcttgaactcctgacctcgtgatccacccacctcgggtcttccagtgtgctgggattacaggtgtgagccactgcgcctggccgggagttttatctataagcccctgactgactgggccttctgtttttctttcagagatgccctgctcagagaggaggaatctagagaggcagtttggctacagcggctttgctgcactgcagtgggctccgcccagttcgaacttcctggtagcttcgtttacactgtgaggggaaaaccacctactgtttctattgaagcaccagtcacaatagccaaaatatggaaaaaacttaattgttcatcaacggtcaaaaggataaagaaaatatggtatatatacatgatggaatactatttagccataagaaaaaatgaaatccagttatttgtggcaacttggatgcacccggaggacattatgttacttgaaatacgtcaggcacctaaagataaataccacatgttcttacccatatgtggggggttaaaaagttgatcttatagaagtagacagcagaatatttgttgctagaagctgggaagggtaaggggtagggacatggggagaggttggttaatagatacaaggttacagttagaaagaattagttctagtgttttacagcaccgtagggtgactataataaacaatttattgtatatttttaaatagctagaagagaggatttttaatattaccagtacaaagaaataataaagatttgagaggatggatatactaattgccctgatttgatcattacacattgtatacatgtttggaaatatcatgctgtaccccataaatatgtacaactattatgtatcaaaaataacaaaagaacaaataaaaaataaataatatatgtttaaaatacataaagagataaaccagattaggttaaaaatagaactaccatctgatccaccaatcacactactggattgtatgggaaatgaaatcagtatttcaaagagatatctgcactcccatgttcattgcagcactgcttacaatagccaagatatagaatcaaaataagtctccaagaatggatgaacagataaagaaaaatctggtatatacacacaatggaatgctattcgccataaaaggatgaaatcttatcatttgcaatcacatagatagacctaaggacatcatgttacgtgaaataagccagacacagaaatacaaataccacatgatctaactcatatgtggaatattaaaaataaaagttgacatcatagaagcagagagtggaacagtgtaacagtggatacctgaggctgaggaggggagcaaaggaggggaggatggggagaggatgatcaacaggtacaagctacaattcaataggagcaagtctattgctcagtagagtgactatagttaacagaaaggtattatatattacaaatagctagaagagaggctttttaatgtgcttaccacaaagacatgataaatgcatgagatgataggtaaactaagtaccatgatttaattattttacaacatatatattcatggaaacatcaaattgtaccacacaaatatgcacatttaaaaatcaaattaaaaaaattaaaacaacgactatggacaaatgagcttatgcagccccacttgccctaagagaaatatagatttatgatacccaattataataaagataaatatgctgattcatgtatactttatgcctgcactttaacttataaacagagcttcctaccactttcagttttaggtctcctggtttgtgaactgttctgttgtatgcacaatacactttttaaaaatttctagttttcagctggcagcacccagatcaataaactgactcagcacaagaagatagcttggactccctatgatttcatctctgatctgaccaatcagcactcccggctcactggctttcccccacccaccaagctgtccttaaaaactctgatctgatccccaaatgctcaaggagactgacttgagtaataataaaactccagtctcccagaaaaaaaaagaaaaaattctagtttcatctaattttattcttgacagaagaaagagaaaaaaatatgagaggccattatggaaagtgggtaaaggagcattctaaaggaacctaatataattgccagacagtgtctcaggtttaattgaagttgttaattactaatttatgtgaaataaatctgcctagttctctgctcttagatttatgatcttggccaagttacttcagtaaagaatgttagtttcattatgtaaaatggtggtgataaaacacttacctcttaatagtgctatgtggaacttagtgctgccaaacagatttctttcctagatatgctacatataaagtcccagctcaagtctccttccaacttcacttcaatgtgtcctctaatccagcccacctcagaactccaagccctgagtccctgaagggaaaagctctaaccagaggtaccacagatcactaaagacctatcccccagcaaaggcaaaggaagaactcctggagtccccatctataaaggaggtcagttttaaagttgagggaggaggaagttgaagaaagggccaagtcagtggattctagcacacagagaagctgtggatggacagcactatgcttctagacaggtgacctggatgaaagaaggacagaggggcaaggagtagacttgcagaggttagggtaaaaaaattatggtaattagaaggtttgggggcctgttttccagaattctgaggtaggaagtgtcttcctaggtgtttatatttttcatttacttactttaggtatcagtggtcttcaaactagtgtgttacatacacctaaggatgtgaaaagattcttcaagagtactcagatacttgtagctctaacaagatatatatccatatcctaaattccatatgggttctttcctaaaattgataatagaggctcatttcctgtcctaggctctcatgattgtcttccttttattttttaaaaaagcaaggcatagcccttctctttttctttcccccttttcctaatccttttccctttctctttatttcctttcccttctcttcctgaacaattcacttctaaagcatttaggtgaggcagagcaaagtagaagtctgtcttggcagtgcaacaatgggtcaggatgaagaaggggagctgtagtggtccacggtcaggtgtcagagcccaagcagggtgagaggtattaagcctgggaggcagcctgatgttggcaagaaggaagttcattggactggagctcactgtggagtgtcagagccagagcacaatgaggaatggggaatgacatgatttgtccaagcaagtaaggcaggcatccatggagaggggaggcccagcatgcagtgttgaagaatgtggaagaggtcattcatgtaggagacagagatgggaagttggctttatacagggagatggatcaaaaattaaacatattaaggataaaaagagccaagattctccctttcagagaagacaggtataaatattgaaatgtaggggaaagaaactaaaatagtccctgctatattggattagaattggaggctttgctatgaacttttggttttcaatacaggcagacatatgtagaaatatagacataaatgcgtgttccctggtcctgtccactaagagagtctggaaacagcagtagcccaatagtagtgagcacacctggcacttagatcttgactccttggataactggctgattttaatactgatgagggaaagcacaaaatgagcctggaacatcttttgtgccagaagagacttgctcaaaaaatgatgaagatttgtccaaaggactcagaagccagcttgaggaggttgccactcgctaaatagagaacaacttgagcatcaaaataaataatgatcatgatgtatcataatccattcaataaggccaagtgtgatggctcatgcctgtaatcccaacactttgggaggctgaggcgggcagatcacctgaggtcaggagttagagaccagtctggccaatatggtgaaacccggtctctactaaaaatacaaaaaaattagccaggtgtggtggccggcgcctgtaatgccagctacttgcgaggttgaggcaggagaatcgcttgaacccgggaggtggaggttgcagtgagccgagatcacaccattgcatgcctgggcgacaagaccaagactctgtctcaacaacaacgacaaaaatcaaataaaatcggataccataaatccaaacagacactcataggtatatgactaaattaaagatttgttaagaaattgaatatttacaaagctttaaaatacctttccacaaatatgtattttgtgtagtgtaagagtaattttacagtggatatgtaacttgacagagggtacaacttaagtgatcagtgtaaacatcaattaagggagagattgaaatcttatatcattgatataagaatgcattgagaatacagaaacatctctgaaatatttctgcctaaaatgcataatctgaatccaacatgagaaaatagtagacaaacccaaatcaaggaacattctacaaagtagctggcctataatcttcaaattgccaaagtcatgaaagaaggaaagactaaggaactgttctaaaatgaataacacaaaagagacaggacacctaaatgcaaggagtgataaggagcaaattctggtgtaacttgaataggatctaagaaatatatagtaataatgtaccaatgttaatttcccaatattaactcttgtactgtgcttatgtacaagaatggccttcctcacaagaaagttacactaaagtatttgggagtgatgagacatcatgtcataacttactctcaaatggtttatacccacaaaaaaatctttgtattgtatctcaactctttgataagtttgtgattattttgaaataaataataatataataataataaaaatggagatgattaatctcaaatcttaagacagtgtattgtcatgaagtgtaaaatgtcaagggcatcaaaatgaagagatcatgttacaagcccttcaatcaaggcactgtgaagtccaccatcccatccatctcattaagaaatgcatttacaaatatgaccttatctcttatctttaataatcattaattaagttgcttaatatttatgttgatttgatcagttaataatagaaatgataaagcaaaaagaaaggttttgatactttgaagctttatcgtcattatggtcataagaaattttataatatttatacatacacatgaatatatacatttgttgcaaaaaactatgataggataatctacaaagagactttcaatattttacttaagaataaaattattttaaggcagtggaaaagaaataagaaaaaagatgaatacaaaattttcaaatattgaaagagagtttgttcatttattttattttattttattttatttatttatttatttattttttgaggtggagtctcactgtctcccaggctggagagcagtggctgatctcggctcactgcaagctccgcctcctgggttgatgccattctcctgcctcagcctcccgagtagctgggactacaggcgcccgccaccacgcccggctaattttttttgttcacagcgttagccaggatggtctcgatctcctgaccgcgtgattcacccgcctcagcctcccaaagtgctgggattacaggcctgagccaccgcgcccggccgttcatttttttttttttacatggatgataagtaagtttcttttttcttttcttttcctttttttttttttttttttttgagacggagtcttgttctgtcacccaggctggagtgcagtggcatggtctcggttcactgcaacctctgcctcctgggttcaagtgattctactgccttggcctcctgagtagctgggattacaggcacccaccaccacgcccagctaatttttgcatttgtagtagagactaagtttcaccatgttggccaggctgatctcgaactcctgacctcaggtggcccgcctgcctcaccctcctcccaaagtactgggattattagcgtgagccacctgtgcccagccaatgctgtttcaaaatacatgagtttcataaaaatttgcatggattcatttcagagtcataaaatagtttcttttttaaaatgtcaatatttgtaatgtattttaaaaatacattccttgcaatatttaaacatatatgaaaatggcagatgtcaacttgaaaatatgtgagggggtatgaagctgtttaaaattcctttagggagaggccaggtgaggtggctcacagcttataatcccagcactttcggaggccaaggtgggtgtgatagcttgaggccaggaagtaattcaagacaagcctgtacaacaaagtgagacctcatctctacaaaaataaataaataaataaaaattagccaggcatggtcttggtcatgccactgcattccagcctgagcagcagagcgagtccctgcatgaaaataaatagataaaataaataaaataaaattcctttagggatacgcaagcaaaacgtttgaagatttctgctctagactacatatatatgatcaaacatgttctcacatttaatggaagataaacatatatatcggcattatacaacaaaagttataatacaagccacaaatgcaaggtgcatatgtagttttaggttttctagccacatttttaaaaggaaaaagaaacagaaaaaaaaattataagaacatattttatttaaactaatataccaaaaatattatcactgcgcagaacgcaatccatgtaaaaaatagtgatttttacttttttgtcctaagtttcaaaatatagtgtgtgttttacactcagagtacatctcaatttagaccagccacatttcttttcttttcttttttcttaacttttaagaccggggtatatgtgcgggattgttacataagtaaacttgggtcatgggggtttgttgtacacattatttcatcacctaggtattaaacctagtacccataagctatttttcctgatcctctccctccctcctcccaccgttcaccctctgataggtctcggtgtgtgttgttcccctctgtgtccatgtgtttccatcatttagctcctacttacaagtgagaacatgtggtggttcattttctgttcctgcattagtttgctaaggataatggcctccagcttcatccatgtcactgcaaaggacatgatctcattcttttttatggcttcatagtattccatgacgtatatgtaccacattttccttatccagtctattattgatgggcatttaggttgacgccatgtctttgctattgcgggtagtgctgcaatgaacatacacgtacatgtgtcttaataatagaacaatttatattttgggggtatgtacctagtaatgggattgttgggtcgaatggtatttctgtctttaggattttgaggaattgccccactgtcttccacaatggttgaactaatttacactgccaccaacaatgtataagtgttcctttttttccacaacctcaccagcatctgttatttttttactttttcataatggccattctgacttgtgtgagatagtatctcactgtggttttgatttgcatttctctaatgatcagtgatgttgagctttttttcatatgatttttggtcacgtgtatgtcttcttttgaaaagtgtctcttcatgtcctttgcctgtgttttaatatagatgatacatattagacatttgtcagatgcatagtttgcaaaaaatttcccccattctgtaggttgtctgtttaatagtttattttgctgtgcagaagctctttagtttaattagatcccatctgtcaattttgcttttttggcaattgctcttggtgtcttcatcatgaaagctttgcctgtgcctgtatcctgaattgtattgcccacgttgtcatccaaagtttttataggtttgggttttacatttaagtatttaatccatctggagttaattttgtatatggtgtaaggaaggtagaccagccacattttaagtgctcaaaaaccacatgtcactaccatattggagagtacaggtatatcttcaaaacctagtaattctggcacatcgaatttttaaattcttttttttttatgaataggaagtagaaaactttaaacttctatataaggacatgagatgagaattagctataattaaaataattttatgataaaactggttttaactacaataataaatgaaacatactgaattggaaagcaatcatgaaaaattcatccatggatttgatccactgtagcttgaaaattttggcagcctcagcacacattccaattgcatttaaagcaatcagcatcacctacctatataatgtaatgtctacttcattagctgttcagaggagcttttcttttctctaatgatacaaccctaggtattagtttttagaatggttaaaaagaatttcttacatttaaatgtattttttaaagacttgtttggcattggtattttttaccaacctctcactttgctttgtttccagactcctctcaaaggcaataaactttttaaataatcagataaaaggtataatcattagacaaaaattgtctgtattcccaccgcctcactctatgacaaagattcagagacaaatttgaatgctgagagaagttgcttgcaaaggggccagcttccaaaagaatgcatgcactgaataaaaactatagcaatatttacagacaaaaagaacaaagttagtgttgttttgtccattattgtcattgaaagaaaaacagtagcttctcatgtgattattgtatatgcaaggggtgctacacaactgctaaggtcagcattgcaagcagtgagccatgtagttgttttctaagtggaagtcaataacttagaagaaataaaccaaatccttcatccttcatctctgataggaattaatgctaagcaaaactattaattggtttaagaaaagataaagtgttgtttcatggtttatctcaaattacaaagtgttttctggactgtgggtcattacgtagttgtttgttcttatttgtgaaaagtgttagggtaaggtcaggatatcacttttcttttctcatctgcctgaattcagcataccttaacagaatctgtaaagtaccagaagagcagttggacacacaggcacattcttaagcagatgtattttaggactccaaaatttaaaatatgaagctaaggatctgaaaaatcaattcccttaaaattatccatgattacaaatacttattcttgtttctaagagttttctagttttgactcttatatttggagttattctccagttgagttaatttttgtatatggtgtgagttcagggctcaacttcattcttttgcctgtggatatccagttatcccacaccatttatttttctttttcaattgaattgtcttggcactttttacaaataccaattgaccataagcataatggtttatttctggactttcaattctattctattaatctgtatgtctatctttagatatgacaccaaaagcacaagagatagaaaaaaatagaaggagcttcattaaaatttaaaacatgttactgcaaagaatagtatgaataaagtagaaagacaacccacgaatgggaaaaaaaatttgaaaatcatatatctgaaaagatatttgtatccagaatatatactaactcttacaattcaaaataaaaaggcaacacagttttaaaatgggcaagtgatttgaataggcagttctccaaagaatatatacaaatggccaataagcataggaaaagatattcaacttcattggtacaaataaaacagcaatgagttgtgactttatattctctgggatagctaaaataaaaaagacaataacaagtgtcagtaagaatgtggagaattgaaacactcacacatttctggtgagaatacaaaatggtgcagccacttcagaaaacagtttggcagtttctaaaaatattgaacatgaaagtattagaagagcaagattacggactagaagtctccaccaatcatcctccccataaggacactaatttaacagctatctatacaaaacaagcaccttcataagaaccaaaaatcaggtgggcactcacagtacgtggtttcaacttcatatcactgaaagaggcactgaagagtcaggaagaaaaagaaagtcttgaatcatcaataccaacccctcacccatcacccagcagcagtggtacacatctctgggcactagggggagggagagagcagcaattctgagacattgaactcagagctgccctattataacagaaaataaaaccagaacaaattcagctgatgcccacccacagagggagcaataaaccagccgtagccagagggaaatcttggctcttcgatggcatttctggacctgccctgggccagaagggagcccattgacctgaagagtgagtcctaggccaggcagcattcaccacaagctgactgaagcaacctcaggtcttaagagaacatcagtggtagtctggcagtactccccatgcacctgtgatggtagtggctacaggtgaggctcctctgcctttgggaagaaaagggaagagtgggaaggactgtgtcttgtagtttgagtgccagctcaactgcaatacaataaaacaccaggtagacttctaaggtttttgactctaatcacttccagacggcacttctctctctcactcccagacatcacctctggacccacctggagcctcgcagagctcaccaccctgaagggaagaacacaggcctggctggctttgccacctgttgattgtagagccccagggccttgagcaaacataggccatagctagggaatgattacagcgggccttgggaaagacccagtattgtgctggctttaggtctaatccagcacagtcccattagtggtgaccacaggggtgcttgagtcactccactcccatttccatgtggctcaaaatagacagagagacagactctgtttgtttggggaaagtaatagaagagaacaagagtctctgtctggtaatccaaagaattctggatcttatccaagaccatcaaggcagtacttctacaagtctgcaagaaccacagtgttactggacttgtggtgccccctaaagcagtcacaggttggatcacaacaaccaaatccttttgaatatctggaaaaccttaccaagaaggatgggtacaaacaagcccagactgagaaaactacaataaatacttgactcttcaatgtccagcacagatgaacatctaaagatatcaataattgataaacagaaaaacatgacctctccatgtgaactaaataaggcagcagggatcaatcctggagaaacagagatatgtgaaccttcagaaagagaattcaaaatctgttttgagtaaactcaaaagaaattcaagaaaacacagagaaggaattcagaattcaatcaggcaaatttaacagagactgaagtaattaaaaagaatcaagcagatattctggagctgaaaaatgcaattgacatattgaagaatgtatgagagtcttttaatagcagaactgatcaagcagaattagtgagcttgaagacaggctatttgaaaatacacagtcagagaagacaaaaagaaaaagaataaaaaccaatgaagcacacctatgggatctagaaaatagtctcaaaagggcaaatctaagagttattggccttaaagaggagatagaaaaagagttagtggtagaaagttatttaaagggataataacagagaacttcccaaaccttgagaaagatattaacatccaaatacaggaaggttatagaacaccaagcagatttaacccaaagaagactacctcaaggcatttaataatcaaactcccaaaggtcaaagataaagaaagaatcctaaaagaagcaagagaaaggaaacaaataacatacaatagagtgccaaaacatgtggcagcagactttcagtggaaactctacagaccaggagagagtggcatgacatatttaaagtgctgaaggatgaaaacttttaccctacaatagtatatccggtgaaaatattctccaaacatgaaggaaaaataaagattttcccagacaaacaaaagctgagggatttcattaacaccaggcctgtcctacaaaaaatgctaataagagtacctcaatcagaaagaaaatgacattaatgaaaaataagaaatcatctgaagatacaaaactcactggtaatagtaagtacacagaaacacagaatattatcacactgtagttgtggtgtgtaaactaatcttaaatagaagtactaaatgatgaaccaatcaaaaataacacaacaactttcaagacatagtacaataagatgtagatagaaacaacaaatttttaaaaagtagggcaacaaaattaagacagaatttttattagtttcctttttgcttgtttgtttatgaaaatagtattaagttgttatcagcttacaataatgggttatgagatagtatttgcaagcctcatggtaatctcaaaccaaaaaacatacaacaaatacacaaaaaataaaaagcaagcaattaaatcatatcaccagagaaaactgtcctcactaaaaggaaaacaggatggaaagaaagaaggaagagaaggccacaaaacaaccagaaaacaaataacaaaatgacaaaagtacatttttactcatcaataataacattgaatggaattgactaaacttttcagtcaaaagacatagagaacctgaatggattaaaaacaaacaagacccaataatctgttgccaacaaaataaacacttcacatataaagaaatacacagactgaaaacaaaaggatggaaaagtatattccatgccaatagaaaccaaaaaagagcagaagtagctatacttatatcaaacaaaataaatttcaagacaaaaactataataagagacaaaggaggtcactatataatgataaaggggtctgaattgctaaaaaggatataacaattttatatatatgcatccaacactgaagcacccatatatataaaacaaatattattagagctcaagagagagatagactccaatataataatagctggagactctaacaccccactttcagcatcggaaaggtcttccagacagaaaatcaacaaagaaacattggacttaatctgcactatataccaaatggacctaatagatatttacacaacatttcatccaacagctgcagaatatcttttcctcagcacaaagattatcctcaaggatagaccatatgttaggtcataaaataagtcttaaaacattcaaacaattgaaataatattaaacattttctctgaccatgatggaataaagctataaaaacaagaggaattttggaaactataaaaatacatggaaattaaaccatatgatcctgaatgaccagtgagccaatgaagtaataaaaaaggaagtggaaaattttcttgaaacaaatgatagtggaaacacaacagaccaaaacctgtgggatacagcaaaagcagtactataagggatatttacagctataagtgcccacatcaaaaaagaagaaaaactgcaaataaacaacctaacaatacaccttaaataactagaaaagcaagagcaaaccaaacacaaaattagtagaagaaaagaaataataaagatcagagaagaaataagtgaaattgaaatgaagaaaacaatacaaaataatcaatcaaacaaaaatggttttcttgaaaagttaagcaaaatttacaaagcattggccagactaagaagagggaaggtcaaaataaataaaatcagagatgaaaaaggagacattataactgatactgaagaaattcaaaggatcattagtggttactatgaccaattctatgtcgttacattgggaaatctagaaaaaatgggcatatcctagacatatacaacacaccaagattaaaccatgaagaaatccaaaacctgaacagaccaataacaagtaatgacatcaaagctataataagaagtctcccagtaaagaaaagcccaggacccagtggttttactgctgaattctaccaaacatttaaagaagaactaacaccaatcctactcaaactcttctgaaaaatagaggaggagggattacttccaaactcattctgcaaggccaatatgactttgttattaaagccaaacaaaaacacattaaaaggccaagtgcagtggctcacacctgtaatcccagcatttggggaggctgaagtgggtggatcacctgagatcaggagttcaagaccaggctggccaacatggcaaaatccagtctctactaaaaatacaaaaattagctgtcatggtggtgggtgcctgtagtcctggctactcaggaagctgaggcaacagaattacttgaacctgggagatggaggttgcagtgagccaagattgtgccaccacactccagcctgagcaacagagcaagactccctctcaaaaaatacttaaaaaataaaaaacacgttaaaaaaggaaaactagtggccaatatctctgatgactttttgtttgtttgtttgttttgttttctgttttttgttttgaaactgggtcttcctctgtcacccaggctggagtgcagtggcgtgatgatctcagctcactacagcctcgacctcccaggctcaagcaattctcccaggagcctcccaaatagctgggactacaggcacatgcgaccaaaatgtgatttctcacctgatctccctagtccccactctgaccggtgttccataatggcattcttgttcctcatggggaaacatagactgatggttgcaaatcccatgtctgccagggccaacacattagccatcaccatcatagatgattggcctccaccttccaagtcttaagtaaatgcatcttattgtcagaacttaaatcatacctagaaccctatggcaagaaagttcagtaaatgtatattttctagcctctgtagtacagggagtgaagatggtgccttgtactcagttgggaaagactggagtaagaatgaacttgaggaaaatgttctcttttggccatgttaattttaaattttaattaaattttaaatttaaatttaaattttaaaataccgaatttaaggatgatgtgttgcacaactctaggggattcaatggagtgccatctacatttatatatatatttatatatatatatatagacatatatagatatatcttatatatatctatatatatagacttatatatagatacataaatatatatatttaaatttttgtacagacagagtctcactatgttgcctaggctggtcttgaactcctggcctcaagtaatcctcctgctttggcctccctaagttatatatattttttcatgttgagatgtatattgattctgagacatatatatgtatatatgtgtgtaagtatatgtgtgtgtgtgtgcacctaaaactatatgtgatggacctgcctcttagaatcaaagtgaagattgttgggttcatgagtttagagctcagagaagaggtcagggccagagataaaacccaggacatcaatatgtaaaagttatgtaaagaaagccgtgatactaaatgagatcatatagggaaggaagagtctaatagcacctcaacatttagaattcagaatgaagagaaagagccagcaaaagaagctggtcatgagtagccaatgaggtaggagaaaatgagaagaatgtagtgtcatggagacaaaactgttgcattctgttgagagatcaagaaagatgctggctgagatcaaccattcggtttttgacacaggacggcaattgttactggtaaacaagagtggtttcattatgatcgtgaagaattaggataggctagaagatgagaaagtggagtgggtatagccaacactttcaggaaattttacagtaaagaggagagaagaaatgatagagtaattgttgactggtggctaaagataggtagaatctgtcacattcaaaacgtaacctttcattgataaaacaaagacacttaaacaggaatagatattgaattttattaataacgatttttaatagactttattttttagagttgttttaggcttacagaaaaattgtacggaaactgagatttcccatgaaaaccctccccatgcacacatggtttctcttatgattaatatcttgcatttgtgctatttgttacaactgataagccaatattgattcattattattaactaaggtttatagtttaccatagggttcattttttgggttgtacagttttattaattttgacaaatgcttaatgccatgtatccactcttccagtgtcacacaaaatagtttcactgacctaaaaatgccctgtgttacaattatttgtcccttttctccaaacctctaccaactgaggcagagaatagggtctggaggcagggaacctaaggccgattcatgctgactggacatcagaggctacttccttttcaacccctcctttttctgggtggcagatgaaaaatgacaatatctctaaatggtcccttcccataaccaatcagactggtcatgggcctactcttcactctgattggtcccctcctacaaccaatcagactggtgatgggccactactgcgtttgcatagagtgaaccaatgggaaacctctagatggtatttaaatcccagaaaaatctgtaaccgacactcttgagccacttgcttgagcccactgccaccctgaggagtgtactttcttttagaataaatctctgcttttgctgccttgctttgtttgcgcattttgtccaattctttgttcaaaatgccaagaacctgaacaactaccttcaaccggtaacacaaccattgatccttttactgtctctataattttgtctttgccagaatgtcaaatagttggaatcatatagtaagtaggttttcagattggtttctttcacttagcaatatacatataagtttcctccatgtctttttacagttttatagttcatttcttttatcactgaataatattccattgtacacagtatgtttttccattcacccattgaaggatatcttagttgcttccaatttttgacaatcaagaataaaactgctataagcattcatgtgcaaatttctgtgtggataaattttcaactcatctgggcaaataccaagaagtgaaattgctgaatcatatggtaagcctatgtttaactttgttagaaactgatagactatcttccaaaatagctctactattttgcatttccaccagcaatgaatgaggattcctgttgttacatattttcaccactttgtgttgtcagtgttttggattttagccattctaataggtgtgtattggtgtcttaatttgcaattacgtaataacatatgatgttgggcatttgttcatatgcttatttgcaaactgtatattctctttggaggtgcttcagttcagatcttttgctcactttgtaattgggttgttttaacacaattgggttggttgtttattgttaagttttaagggtgttttgtatattttgggtgtaagtcctttatcagatatgtgttctgcaaatatcttctcccagtctgtggcttttctttaaattttcttaatattatcttccacagagaagtctttaattttaatgaagtctaaattatcaactttttctttcatggatcatacttttggtactatatctaaaaagtcatcgtcaaacccaaggtcacctagattttctcccatgttgtcttctggaagttgtgtagttttttgtgtcatgtttaggtctatgattcattttgagttcattttgtgaaaggtgtaaaatctgtgtctaagttttgttttgtttattttggtttttggcatggtgatgtccagttgttccagcactatttattgaaaagccttttctccattgaattgcctttgctcctttgtcaaagtcctgttgaactatatttgcatgggtctatttctgcgctctccattatgttccactgatctatttgtctattactttgtcaatgttttcatcactatggctcaatagtaagtcttgaagccatagagtgccaatcctctgactttattttttttttccatattgtgttggatattctggttctttttcctttctatataaacttcagaatctgtttaccaatatccatgaaataaattactgtgattttgattgggattatgttaaatctatatgggaagaactgacattttaataacattttcttgctgtccgtgaacatggaatatcttttcatttttgttttctttgattttttaacagttgtatagttttcctcatataagtattatacatattttgttaagtttataactatgtcatttttagtgataatataaaagaagtcgtgtttttaatttaaaatgttaattgttcattgccattagatagaaaagcaattgagttttttatattaatcttttttcctacaaactcactataatcacgtagtggttccaggattttttgttggttctttagaattttccaaatagataattatatcatccacaagcatagttatacttattccttttcaatccatatcccttttaaatccttttcttattttattgcattagctaggacttccaatgtgaagttgaataggaatggtgagggagacatccttattttgttctcagacttgaagtttctgtctattcctagttttctgagaatgtatataatgaatgggtgttggattttgtcaaatgctttctctacatttgaaaaattctataatttttcttctctagtctgttgatgtgaaaaattacattaattgatttttaaaatgttgaatcagttttgaatacctggaataaattccagttaaccatggtatataattcatttcaaattactttttaacttttatcaagatgatttatatgtgatgattttattattatatttactaatattggattttcctagtatttctgcaattgaactacatgttttacgatgtattcgctttttaatatgttcataaattaaacctgtattatttcattgaggatgtttctacctagtggtggtagtgtggaagcattagatgcttcatactggaaaagagcaatggctttcaaatcacattatcctggatctgaatcctaactccacaacttagtgatggtctgtgcttggactagttatttaatttccctaggaccttaatactgtccacataagactgtaggattaaataaattagtacaacctctatggaaaacaatatggagatttctaaaagaactaaacatagaactaccatttgatctggcaatactactactgggtatttacccaagggaaaataaatcattatattaaaaagatgcctgcataggtatgtttatctcagcactattcacaattgcaaagatatggaatcaacccaagtatccatcagtggatgattggatttttaaaatgtggtgtatatatatatgtgcaatggaatactactcaagcataagaagaacaaaatcatgtcttttgcagcaacatggatggaactggaagcaattaagtgaactcagaaacagaaaatgaaacactgcatgttcttagttataagtgggagtgaaataattcatatacgtgggcatagacactggagttataagcaggagtgaaataattcatacacatggaataatggacactggagactgagaagagtgggaggggggtgagggatgagaaattacttgaggagtacagtgtgcactattcaggtaatggctatactaagagcccagatttcaccactatgcaatatatccatgtaacaaaactgcacttgtatccccaaaatctatatacgttttaaaaaaaaattatgtctcatggcatatgtaagcactcaattaattcgagttattaatgttaatattttaggtgagattatataaatactttttttgcactcctttgccacattttatcagtttttagcagataagaatctcaatgtataaacaacaacagagaaaacaacattcacattttaaaatttatttttaatcattttcacttcaacactaagattcccatccagctctatagacaggaagttatacctcaaccattcttgggattaccccttccccaggtgttacaaggttctggggtcttacatggcatcaagactttgagatatgctcagtcataggtcattcttgctgatacgcagtcttgcataatctgcaggccagttctggcccagaagtacagaattacagaaaaatatggttagaaaaataggctcagggaccaaatccaaatcccccaggtttaaattctgtctctgcctagctgaacctcagttttctaatctataaaatggggagaatgataatacttaacccatagagtttatgtgagaaataaatgaattagagcaggtgtaaatgttagctactttttaaaattaattatagcatgggaaccttggacagggttagagattccactaaagttctgcatcttctgggtggtaccgctaaagagcagagaaagagtcatcattcaagggactcacaaatctttatcccctacccagtctcttgcttgatgcttctcaaagggcgctatccctcacttctacccctcaggacatccagcaagatttcttcagcaggcttggatttttggtggagaaaagtcaggaaaggaagatgtgggtagcccctactctctatcttaccacaaatcctcgggcaaagaagcataaagactagctacctgctcaaagcagggaaggaaatggggaaaatgtagaggaaaaaaacataaaataacatctcgaatatctatcctggcctaaaaaataaacgtagcttcataaataactcagaaaacttttttttcttccttctcttagcaccggaaaagtaatcataaaaaaaataaagcctctcttttcccctcctcctctaccctctccacactcctctcatactcctttcaaaaaaaaattgcccataaaattttctggatgagagaattttctggatgggagcactttctggaggcaaatttcttacatttaatagacaaaaaacaagctaacatctgccttttgatctacatcaaaaacaaactaccccatgtcatggatttcacatgtgctggaagcagttagtgtaaaatccattgatccaggaagtctggtgcctgaatgataccatctcttcattaattattaagaaatatgagagaaggaagattacaaagaaacaagaagcaaaaataggccaggcacagtggctcacacgtgtaatcccagcactttgggaggccgaggcaggcagatcatgaggtcaggagttcgaggccagcctggccaacatggtgaaaccccatctctactaaaaatacaaaaacttagccgggtgtggtggtgggcacctgtaattccagctacttgggaggctgaggcaggagaattgtttgaacccaggaggcgaagtttgcagtgagctgagatctcgccactgcactccagcctgggtgacagatcaagacaccgtctcaaaaaaaaaaaaaagaagtaaaaataaatccaacgagcacttaatacatgcctcttgccttgttaggccttttatatatcatttgcatgctcgtatatgagaaggaaaatagcaaggtaagtctgtcgttcccattttatggatgagaaaacagggttattgaggtcataccaccagtagatggtggagcaaatatttaaatctagttgattgatgcctaaacctatcctttctactgcatctccactgctttatagcgaattaataacaaatatgagaatcttcctcccaaacttcattgttgcaaagtaagatttctaatgggtctagttctttgataagctgtaagctgagagaagacctgtaaaaactaatatatatttattaacatcagagtaaatttcactgcagaatacaggcctcctaaacatttctcttgaaaaacctgcatcccagatgaagatcttctaccttatgagggaaccttttttaaagccattttggcaaggggatggttgggctgaacatttgggtctttaaggcctttttaaaaaaaggctcacttatatgtagatttgggatttttttccaaatcccctatatgtggatagccccccaagtaagagactgagccttattaatgggaaaggaatatcacccgcttctattttcatgcaaattgtcccagcagaataaaaagggggacagtgaaagtgatgacactgatctaattatctgcaggccaatatcactaacttcctgaaaggagcccacagaatggcctgacacagacacacaaaacacagccaggaaacaatcgggaccttagcaacaaggcaaaaactggctcctctctgcataaagagctgttttatgagcatttcttgttactttcaattaagccccaccaccccccaccttaagaaggtccatttttaatcgatgcccctgttgccctacaatcactgacgtgtaccattccaccagctctgccttcaaaaccagcatccactcacatagtttcaagccctggttctgtgagagacatagaacataagaatacgacttcagtggttataaagcctcagcatcctgacagtgtgctacttcacaaactctctcatatgatcctcagaaccacagagtgaagcaagtgtcaaaatcctcacacttaagatggggaaaatgaaatccagggagattaagtcacctgaagaaaccttcagagccagcaactatgggtaaaggtgactgaagtccaaaactcttcataccgcaccacacggcagctatgttgttaatacatcggcaaaaggattaaaatgagagctgtccccttaaaagcaacttttaatttagttcagcaatgtcctggtttactttagttctttgaacccagcctgcttgatctgggtcctaaggccctcccatctttgctgaggagtctctgccccatcccaattctctcaccaccacctcccaacctgatgctagctctaatcctacttcaaatcctgtccctgccttacccccattccctattgtctaagtatcatcactgccaagaacccttgctggtgtatcatgagtggttctggttcccaggtaaaaattctggccacctgataccagtctggattaaatcaaattcttggctatccccctcagaggtcagaggtcaggtctcccctacagagagcttcattcctccaacctgagccctccctgagtccagctccagtcacttctccagggcctgactttaaagtttcataccccgtggcagaggtagagtagagtagggaatgatcctgcctgactccaagggaatgacttggagtcgggcagagacttcggtttgcatcccattatatgagctgggtaagttatgtcagctgtgtaaactttttcagtctgcattagaaatagaatactattccccttatgagaaacctggcacactatcattctgcaataaagggtaggtgttttcattacttgtcagctattccctaaggtttgtccatggccattacttttttacttgtatttaatcaaaattccccctattattatttgaatataactttatattcaaattaaatgataataagttgcttactacctatgaatagctaatactatttaaggagtgaataaatgactaaataaatcaatgaataatcacagcaatgagtcaaaccatttgatatacctggagtaaatgaatcaattccatttaacaaatacatataaatagctattacatcccaggcaccctgcgatgtcctaggtaaatagtagtgaataagacagacaggatgtttaccttcatgaagcttaccgttcagcaattactctctccttcctatggattttgatatgcgatctattacaacactgagcaaactgtattggaactatttgctttggaagttgccttctcttccatgaagagcacctggcctgtgagcaccatgaaggcaaagactgggtcttgatcacctctgggctccagcacttggcccagtgcctgctaataattctatgtatagcccaatctctcaatcctaatagagattttactattttctctgggctttccttaagtgttcacattcctgtttatctcctcctaacaagaattcaggcaggaaacttcctagaatttgcccatcaagatctagcaaggggccaggcatggtggctcatgcctataataccaccattttgtggggcagaggcaaaaggatcacttgagaccgggagttcaagaccagcctgggcaacatcgctagactctgtgtctgcaaataataaaatgctagccaggtgtagtggtgcaagcctgtagtcccatctactcaggaggctgaggcaagaggacatgagacactaggctgatcaagaaaaggcagctagttacgtttcagacactggaacacacaggatgtgccagggcttcctcaccttccttcttgtgtcacagttggagggaaaaacatatggtaagcaccaacaattatttgtgcctacttatacagtaagtggagagcaggaagcctgaatccacccacctcactctcttccccaaccctttctgttgtagctaaagatggtgaacatctgacagcaggcagttttcaccttgccacagaggaaaccttaggagtaaatggtgcccagtaggtcatttcataaagcagatgagagcagagctcttctgatggaagtgaaggtgtgaggtccagaatgccacctgctcagccccctccttgtcccttgcacttggtaggcgtggggttgcaagcagatggggagaactgggaaaaggatgaggaggttatggttcataaagagaagccacgatgctgcagagcactggggattttatattctttagggttttattatgccaaaacaatggcgggagaacacagttaggaatgaatgataactggcttccaggatcctcactaaccatggtgattatctctcagccaaagtctacaggcagcagactgataagagacacatcagttcttctgtttacaattcatttagagctttttgttttttcatttatgtggaagccagtttattcaggcctccaagataggtctctagtcaccagggaaacatttgtcctttatcccttaactacctcttgactcctcaaaaccagagaggaaaatatacctaaccagatggtaagacaggtctgagttcacgcaagaccttctttcaaaggctgtggaggcaggagcctgtgtaaccgcatcagcctgtagccaggcatcctccggaggcccctctcccaccacaccccagctctgggcagctgcttcccagctgcagtgcttgccaaccctcagactggagggagggaaatgaaaccatagccatttatcacctgtcaaaaattcagactccacttgtcctgaacatcacagccagacacactaagataagcaccagtcagaggacaagaaggggaatgtgagggagagccaaggggcctgtagcccacttgcagagaagaagatagtaacataacagaacattttgccagtatcttcctgtccttgacctaaatagggcagcagagtctgtggatgtgcgtttctctaggagtaaaatgatctggctgagggtttctgttccactccttcactgtgcctttcagaaacttacctgggcctcctaagacctggctgcttcttctgtggagagagaataataggaacatctgcttcaagattttcataaaggtcaactaagaaatgtgacaaggtttgtgaactataaagcactaaacataagtgagtattaagagcatctaaaggctctctagagtctggttttgagtgtattcatcaaattatcatctgcctgttttctgttttgtcctatgtatgacctaggacaaagcaaaggaatcagtgactgccaattgtcatgttgcctgggacaatagcctaattagatcaccgaagaagactgcaaggtggagaggaaatcacataggcctgaaggcagataagcaattaccagctacagggccttgggcacattaccttatgtttttgtttgtgcactcttatcggtgatatcaggccaacggcacataccttctgagttggggtgattggtaagctgtctaaacttcccagttggtaggtggagataagcatgattatgcttgtccaggtcactaagacaaaatatcttgaaattagtactcctgtaacgagggtgcaatttaacaaactactatttcatattttctttaattgctccaattatcctcaaaacttacaggagagagaagacaaatttttcaattcatggtatctctttctcttcatgtttaacagtctcttttgtgtatgttggtgtctttggggtcaatgctcttttgactttctctcccttcctctgatccacctagaaatggcatttgggtcagtgaggaggagcttacctggacttgccgcagttgaagagcagggtcctcacatttctccagaaagttccttatattgtactctcatttggcctctagactgggacacgatgaggtgttgctgattccatcatatcttttacggttatcatactgtatctactgcttttgaaattcttagtactagtcatttggctgggttgcaaaactcctatgtgatctttatttccttcttttttttttttttttttgagacagcatcttgctctgtctcccagactggagtgcagtggcgcagtctcagctcactgcagcctctgcctcccgggttcaagtggtactcctgcctcagccacccgagtagctgggattataggcatgtgccaccatgcctggctaatgtttgtatttttagtagagacagggttttgccatgttggccaggctagtcttgaactcctagcctcaagtgatccacttgcctctgcctcccaaagtgctggggttacaggtgtgtgccactgcacctggcctctatgtgatcttttctttatctcaagcccagctcggctagtccactaatctccttggcacatctgagccccatcaccaaaccaagcagaaactttcgaattccctgtgcgtcctgcacagaccagggcaatcagcagtactatcttacactatctatctagaccacttgtcagccactgctgcactgtacagcttctgcctcagcttaggctcagtgctaaccagaatgcacaacttcttctagaggcttgctgcgtccctaagccctggacccaggccagtatttctaatgccttcagttgtcttatgcctctctgaagacttccatggtgcacacacataaacacacacacacacacatccctcacacaaacacatatacacacacacctcaaagttataccctaaaaagaggggaaaatgaggacgctggtgttcgtctgtcttaccctaccatgctctctctcctccttctaagattaacaatgccagaagaggtgggatttctctagttatttctcatgagtcagagccttttcctatgtaccctgagcattccttgtattatggtttatagtaatttttaaaattatactttactaatgtgtcataaaatcaatttagcaggccaagaccagatttttagaaataaaatctaaaacacaataaaaagtgtcaatcagagggcatctgaaatttttattacaattttacatgaatgtgtgtatgtgtgtgtgtgtgtgtgtgtgtgtgtgtgtgtgtgtgtgtgtgttgagtgataacaaaaaatatatttgttaccatagattgtaatcaaaaagtccaggccagtgcagtgactcatgcctgtaatcccaccactttgggaagccaaggcaggaggattgcttgagcccaggagttccagaccagccagggcaacatagtgagaccctgtctccacaaaaaataaaaattagctgtgcgtggtagcacatgcctgtagtcccaactactcgggaggctgagataggaggatctcttgagcccaggaggtcaagcctgcagggagctgtgattgcatcactgcactccagcctgggtgacagagctagatcctgtctcaaaacaaaacaaaaaaaaacaaaacaaaacaaaacagaacaaaacaaaaactaaaaatcactagctacatttaaatgagcttgttgaaaaattcaaaaataaataaatagaaattcaagcaatgcttttggtatgtaaagatagcttaagacttaaaaaatcaatcctggccgggcaaaatggtgcatccctgtcgctacttggtaggctgaggcaggaagactgcttgaatatgggactttgagaccagcattggcaacagagcaataacaccatctcaaaaaaaaaataaaaaaggaaaaaaatcaatcttttctgtcaaaaatgtctgatctcaaaaccgttgttttactagaaattcatggaagaattcaggggtgaagctgaattctgagtaatggacattttgctatggtggtatctactcttgcagtgacagatgatgacattgagtcattgagtgaagagctacaaagcagcaagatttataatatattaaaaataatctgaatagtccaaaaagtatgatgcccaatacacttttagaaaggtgtatagtatacaccactagcagacctggcccaaagagcacactaggattcaatgagctcttactcccagcgctttgccagacatcccagaatcaaggatatcctgactgacttacatcctgccacgaatgatctattagtaatcctgtgattatcttcaaccaaactgagttattcaccattttaaaggccaaatttaggagtgagcctgccaggctactttccaacatcctggttcataaggggagccaaagcaggtctggaataaatgtcaacagatggttttaaacaactaactgcagcccagtttcaccagaaacatccaccaatcgagtcaggagaaagcctcagagcaccttgtgccatataagtaagaagagtgcctcagagtttgggttgatccagaaaagaccacccctcttttgagttctgtgcccctgacaggaccctcactctctctcctccctgtccctccagcactcacagcctacacccctcctgcctggagaccatcagggttacctcatatgccgtttacatctacttaagtcagacaccaaaaagagtgtggagcttccttgtcctctgggctcttatccccatttggcttgctatattcacttttctgatgccatctacctggggagatgtctgaggaaacgcttccgctatatccccctggaaatcagagccagtcatcagcaaatcccatacatcttcaatcttgtactctcccttggccttcttggtctaacagacatctgactctcccaggaggacattgcttctccagaaaccctctcaagtggttgctgttttatctccaaactccttgtaccacacagatccctggtgggggtaaaagttttccttgcccatcttgatgcttgttgaccacttcacccctctgccttaacactctgcttttaatcacatcaccaggctatacaatcccctattcccacttcattgctgtcatctactgacctctaagtcatgctccctcatttcttgaagattatatctcacttttgctctcatttagtttaaatcaataatttcactgagacataatttaaataatcatgcagctcttcctccctgtatcctggctcatgtattcattgacctcatctcctccattgtctcacaccctcgtctagccatcattcccatggtcatgtactgcaccttattattcccaatacttgcaaattttacctaatttgagtttcaagcaacccactctctgatcatcccccctcttatctttccagtttgagtgtcccaattccagcaagtttttgaccccacagagacctccaatctacagataccactccttttcaccaccccctcgccccaactatcagtacctgtggaggcttcactcccctcccttccatatctagcttagagcatattctcatcatcataatttctctcttcaactatattttccctttcttgctttattatactcttcttgaaaagctccaacctcagtgagattcacctcttcactcccagcctacacctgagcagctgaacctggctgaagatcaacacacaaccatgctgaccagtctgattttaagtccattactttaagctcaagcaggcccttgtaactgctcaggaatcatcttccagatccattcactcttccactttcttcactgaggaaatagcaacagtcacatagaactttcagaagttgcatcactacatttgacctaatgcatttgtctgtgcccacattcgcctccttccttctcgttactgtgaatggattgtctttactcctacttcaggccaacctgtccacttgtatatgagatgccgtccccactcccttagttaaaaaggcatcattccagaaaatctcttctccttttcggtaattccaaagcagttgcaccatcttattaatatattctcaccagtcatgtatgaaagttttgattttcccccacctttgctagcatatgctattttccactttttgtcattttgttatcatagccatcttatgtgtttgaagtagtatcatatgattttgatttgcattttcctaatggctaatgatattgaatatcttttcatgcatttgttaaccatttgtgtatataggttttttctagaaaaatctattttagttttttgtccatttttttctttaaggtttttatgctttgcaaatactttctagcaccagacatgtagaagaaatttacccacaaccttactacccccagtaatgtagcaagtgttttttgtgtttccaagtttatctacacacataattttttaattctttttttaaattgtgataaactatacataacataaaatttgcctagtatacacagtggctgccaggtaaatgtatatttaatgaatgaataaaggcacaagtaatgaaataaaagtcccacaccttaggctgactagtcccagatgccacccccatctccagaacagtttcctgtacttttctgagagaagactagagctgttaacttctttcagcagtgctgagttagcagagagaaattgctagccttgtttcctgggctcagctggctgggctccaagctccatggctggccctgggttctggggaaaaagagaagggcagctatagatcactgcttgtgtgaagtaagcaacacttgcttccgcaaagaaaatgtcttctttattcaccttcacctcagccagaagagctccggaccagccagctttgtccccagaccctttctcctccatctcaggaagccgagagtcagagcccattccctcagttctggtgtgtgtggtctgagtctcaattctgtctagcagacagcatggaggaccaaggtcagcaaggtcatcagaatgctaagaggaaatctgattgatgagcaagtgtcagcaggaatgaatgggaaccttaattaatgacttctgccctgtttcaaagaaaggttctcttatacccagttctctcttttctctgaaaaaaaaaaattggggtgggtgaggaactgaggaaaaaaaggaggaaaaaacactcctataatccaaagttttctaaatgacataaaggagacttcaaagacaggcatggtaggttttttatgtgcaagactggttcagtgattctctcctctctttgtttccatggacagctaggctcctttccaaagctaaaaaataaaaggccactttgttctgaggggagctagcttttacaagaaatttcctcctcaccagtggggcaaattaactgcctcagtcctgggtactctgggagcatccctccagagccagctcagcagtccagcttcccactcctgccagaagatacatatatgcaaaatccatatagtccactccacatagaaaactgacttgatcaaagtcagtgtgagaagtgtgataatagaggactgttccaggttcgtttgcaacaaagaggaggcaatatcagcaaaaataggctacagaggattcctagaatagatggtgtctgcactgaggtttaccttcataatattagtcgtaactcagcattgaacatctgccacatgcctggtcccgaggctggctgatgcagaatataaagttcgactcacaactcagcaagtcacttcaaatctgtgttctctgaatcctcacctctaaagtggagatcatcatacctgtttccagatgttgctgaagaagcgatgaaatgagattccttatgttaaattcttatgcagtaactgggacatagaagataatcaataaataatagtttagaaaggcagaggggggtcagtatccctgcccagtgaaaacaacaaacataaaaaacacttaatcacattgtgatgttacaaagccaaaagaggtgtgcacaaagtataggggaaaaaaaggattcaactgtgaacctgtctggtcttgggctttttttgttgttgttggaagattttttattcttccaatcaagatttgattcttccaattaatagcattaaataggtcaaaatttttaaaggctaacgggaagaatggagatactcaaaataggaagttttctcccctttttattctgtcaaaaaggaagaagagaaatcgggaaaaatagtttggaggagatcatccatgagcgtgggatgtttttccatttgtttttgtcacatatgatttctttcatcagtgttttgtagttctccttgtacagatctttcaactccttggttaaatgtattcctacatatttttcatagctattttaaatgggattgcattcttgattcggttctcagctttatcatcattgatgtgtagaaatgctactaatttctgtagtttgatttttgtatcctcaaacttcagcgaagttacttataaaatctaggaatcttttggaggagtctttaagattttataggtgtaagagtacatcatcatgtaacagagataatttgacatcctcttttccaattcggatgcttttcatttctttctcttgcctgatggctctagctaggatttctagtactatgttgaatacaagtggtgaaagtaggcatctttgtcttgttccagttcttaggggcaatgctttcaagttttctctgttcagtaggatgttgcttgtgggtttgtcatatatggcctttattattttgacatatatttcttctatgcttagtttggtaatcgtttttatcatgaaaggatgctggtttttttaatgctttttctgcatctatcaatgtgatcatatggtttttgtttttaattctgtttatgtggtgaatcacatttattgatttatgtatgttgaaccaaccttgcatccctggaataaaatccacttgaccatagtgtattatctttttgatctgctgttggatacaatgtgctagtgttttgctgaggattttgacatctatgttcatcagggatattggtctctagatttcttttttgatatgtccttgcctggctttggtatcaggatgatgctagcttcgtataataagttagggagggttccctccttcttgatctttttggaacagttttagtaggattagtatcagttcttccttgtacatctggtgtaactggcctgtgtagacatttgtttgggccaaataggaaaaaaaaaaaaggattcaactgtgaatctgtctggtcttgggccttttttgtagtttttggcagattttttattaccgattcaattacgctactcattattggtgggttcaggatttctatttcttcctggttcaatcttgggaggtttctgtttccaggaaggtatccatttcctctagattttccagtttgcacacatagagatgctcagagtagtctcccatgatcttttctatttctattgtaccaattataatgacatctttgtcatttctgattgtgcttatttgaatattcccttttttaataagttaacctagtagtggtctatcacttttgtttatcttttgttctgtttttttgtttgtgtgtttgtttgcttgctttttaaagacagggtctttctctgtcacccaggctggagtgcgatgacacaatcatggctcactgcagccttaacctcccagactcaagagatcttcccacctcatccccccaagtagcgagagtccaggggtgtgccaccatatccaactttttattttttaaaatttttttatagagacagggtttcagtatgttgcccagactggtatcaagctcctgggctcaagtggatctcctgcctcatcatcccaaagtgctgggattacaggtgttagcccccacattcagcctttcaaataaccaagttttcattttattgatcctttgtattattttttggtctcagttacatttagttctgctctcatctttgttatttcttttcttctactaaatgtgtgtgcggtttgttcttgtttttctatttccttgaggtgcaatattaagttgttaatttaagatctttctacctttttgatgtaggcatgtaatgctataaacttcgctcttagcactacttttgctgtatcccagaggttttgataggttgtgtctctattttgtttcaaaaaatatttttatttctgccttaatttcatcattgacccaacaatcaatcaggagctgattatttaatttccatgtatttttatagttttgactgttcctctttgtgttcatttctagttttattctcctgtgacctgagaaagtacttgatataattccaatttcttaaaatttgttgaaactagccttgtggcctagcatatgttcagtctttgagaatgttccatgtgcagatgagaagaatgtatattctgtgtttgtagggtagaatgttctacaaatgtctgttaaaactgtacagtctagaatccagtttaagtccagagtttctgtattgattttctgtctcaatgatctgtctagtactgtcagagggatattgaatcctccagtattattgtattggtgtctatatcttttcttagacctagtagtatttgtttcttagatctagtggtatctgggtactctggtgttgggtgcacatatacttagaattgttatatattcttgttggattgatctttttgtctttatataatgacctcctttgtcttttttatggttgttgatttaaagtctgttttatggttgttgatttaaagtctgtttaatctgatataattatagctacttctgctcattttttgtttctgtttgcatggaatatctttttctacccctttggtttgagtctgtaaatgtctttaccagttaggttggtttcttgtatgcagaatatggttggattttgcttttttaaatccatttccctagcatatatcttttaagtggagaattttgtccatttacatttgggttagtattgatatgtaaggttttgttcctgttaagtgttaattgttactctgttgctttgcagtcttcattgtgtaactgctttataagacctaggagttttatattttcctgtgcttttatgatgacaagtatcaccttttcatttctatgtttagaactcccttgagcatttcttgaagggttggtctggtggtgagaaattcccttagtgtttgtctgggaaagactttttatttctccttcatttatgaagcttagtttagcaagataaaaaatttcttggctggcatttcttttctttacaaagactgaaaataggattccagtctcttatagctgagaagtccactgttagtctgatgggatttcccttataggtgattagatgtttctctctttcctcttttagggttttttccttcatgttaacttaatagtctgatgagtatgtgctttcgcgaggttcttcttgcaatgtatcttcaagaggtttgagcttcttgtatttggctctatatatctctagcaagaccagagaagtgttcctgaattattccctccaataggccttccatacttgtaatttttccccttctccttctgaaatatctataacttgtaggtttgagccatatgcatagtctcatatttcttgaaggctctgttcattttgtaaaatttgtttttctttatatttgtctgactgggttgatttgaaagacctgtcttccagctctgaaatcctttcttctgcttggccaagcctattgttgcagctttcaacagtatttcacacaggaaaatataaaactcctaggttagcccctgtaatccagaacttctgtttggttttcttaataatatctgtctcttctttcatattctgaattgtttttctgattttgtgtgtgcgtgtgtgtgtgtttgtgtgtgtctctgtgtgtgtgtgttttcaactttctcttcactggatgtttttaaaatcaatattttgaattctttatctggcatctcaaaaattttattttggttaatatccattgctaaagagttagtgtggtcctttgctgggggttataacactatctttaaatactttcagaactgttcttctggttccttctcatctgggtaagctatctcttctgcttatttttgaatttactttcattgggatgagatatttttctctctctcaaggatttgactacaatttttatggtattgagtcctttggctttggttctgggtgcttccagtggcaaagactttgtgtagtttccttagttacagatagcttttgtacagtagctttcttaaatgctggctgtgctagcaatgtactgggcagatgagcaggctctctgcctcctgcatggctcgtgtagcagaggcctcaggaagctaatctagttccccactgctgtgtgcttatgtcagcaaagtatattttggcttgtgcagttcatcctcagtctgtgggtgatgcttatgggtaacagccaggtgcagctgaggtaaatgggtatatgcttgatctttgtttgccataagatgctccctgttgcctcaggcaatagaccatcctgtggaatgcacagtggtctgagctccctgctcagttccaggagagaccaagcttggcctgccaaattgggcaggcccacctcttcatcccccagtggcaggtgtaagcactggctccaaagtaaagtccagaaggcagccaccaagcacctagagttgtgcctgagtatggagtggagaaacttctgcttccccaagttttccacccaggaaaggaggggtggcctaaacacctaaacagtgggtgtgctgaatgcctggagataaatccaggcatggagtagagggggtgtcactgcaccaagatctctgtacctgaaggaagaggtagctcaggttcctaatccaggtaagtgagtataccaaattatgccccagtgtggagcagaaagggccccactgcaccaagggacctctgaacagaaaggaatatttgacccacttgacccaggaggccaacaggggaagaatggagctactcagaatgagaggatttctccctttgtattctgtaagaaaggaagaagagaaattggaaacattaatttagaggagatcaaacttgttgccatttctcctagccagtgaattcacaggtcctgagccatttggatgtgtctttgagccccttggggagtgttgatttaatcatcagttcgcagcaatttcagaagagagggaacattttaaatcacaccaaagagattcaaacagcaaaatgtggagtatgggaaactataggggaaaaaatgtcaacatttcttcaacaaataacttgtaaagggtagaagtatatttattaaattatacttgcaagactttgcaaccaaatcaataaaaagaaatcacttggatcgtagtttagttttaaaaataaactaatttttagccaggcgcggtggctcatgtctgtaatcccaacactttgggaggccaaggtgggtggatcacctgaggtcaggagttcgagaccagcctgaccaacatagtgaaaccccatctctactaaaaaatacaataaaattagctgggtacggtggcacatgcctgtaatcccagctacttgggaggctgaggcaggagaattgcttgaatcaggaggcagaggttgcagtgagccgagatcacaccattgcactacagcctgggcaacaagagtgaaactccatctcaaaaaaataacataaaaaaaataattttttaaatttatgagacaactgggaaaatgtggaaaatcattctatatttgatgatattgaggaattatggttacttgcttagatataataggagtgttgtggttgcattgttttttaaacactccttatctcttagagatatatactgaaatagtaataatgaaaagtatgatatcagaaattttcttactaataattcagtttgaattaaggaaagtgggtgaggagaatatatctaacaatattggccatgataattatcaaagcagagtgatgggtacttgggggctcatcatactattatatttttacatatgtttgaaacttataaaaattaaccttaacccctacctcacagcacataaatgagtaattaaatctgtgtcacagacctaaatgtgaaagctaaaactataaagatcctagaagaaaacgtagagagtattttcatgaccttggagtgggcaaaagtgttttagttaagacacaaaagtcactttctttctcacacaaaaaataataaatccaacttcataaaaactaaaaacacacgcttttcaaaaaaaaaataaataaaaccaaaatgagatgccattacacacccaccagaatggccaaattttaaaaaaagattggccacaaaaagtaatcaaggagatagagtaatttgaaccttcatgcattgtgagtggaactctacaattttaagccaattttagaaattggtctaacaattatcataaacataaacatatatctaccaagcaattccactcttaggtatatgcctaaaataaacatgtacaaatattcacaaaaagttttgtaatgtaatactcataagagctttatttataatagccgaaactttaaataacccagatgtctagctacagaagaatagacaaagaagaaattgtttttgttgtgcagtagtgctagcgacttcaaggttcggtccttggaccgggcagccaccactggtgctgagctgctaggaagcccctgtctgcaagcttgttgaagctcgaacccattgttactcctctgactcaccggcaaacaaaaacaaacaaacaaaaaatggttgaagtagatcgcccaggaaagctcttcatttgtgggcttaatacggaaacaagtgagaaaagtcttgaagtagtatttggcaaatatggacgaatagtggaagtactcttgatgaaacgaacagataaagaggatttgcttttgtcacctttgatagcccaggagacgataaggatgcagccagagacgtgtatggaaagtcactagatggaaaagccattaaggtggaacaaaccaccaaaccatcatttgaaagtagtagacgtggacccctccacctccaagaagtagaggccctccaagaggtcttagaggtggaagaggaggaagtggaggaaccaggagacctccctcacggggaggacacatgtatgatggtggatagtccatgaattttaacatgagttcttccaggggattactcccagtaaaaagaggacccccattaagaagtgcgggtcctcctcctaagagatctgcactttcaggaccagtttgcagcagcagtggaatgggaggaagagctcctgtatcacgtggaagagatagttacggaggtccacctcgaagggaaccgctgccctctcacagagatatttatttgtccccaagagatgatgtgtattctactaaagacagctattccagcaaagattacccaagttctcgtgatacaagagattatacaccaccaccacaagattatacttaccgtgactatggtcattccagttcacgtgatgactatccatcaagaggctatggcgatagagagggatatggtcgtgatcttgactattcagatcatccaaatggaggttcctacagagattcatatgagagttatggtaactcaagtagtgctggacatacacgagggcccctgccagcttacggcggaagcagtcgctatgatgattacagcagctcacgtgatggatatggtggaagtcagacagttactcagcagctgaagtgatctctactcaagtggtcgtgatcgggttggcagataagaaagagggcttcctccttctatggaaagggggcaccctcctccacgtgattcctacagcagttcaagccacagagcaccaaggtggtggccatggaggaagccagtctgatagagggggaggcagaagcagatactagaaacaagcaaaactttggaacaaaatcccagttcaaagaaacaaacaaaaagtggaaactattctgtcataactacccaaggactactaaaaggaaaaattgtgttaccttttttaaattccctgttaagtttccttccataatttttatgttcttgtgaggaaaaaagtaaaacattgtttaattttatttgactttatgacgttgcttttcaacaagcaaatgttaaatgtgttaagacttgttgtactagtgttgtaactttccaagtaaaagtgtccctaaaggccacttcttatcggatttttcccagtaaacgaggcaagcaattcttaagatctccacaagacatctagccatctaaaatatggagagatgaatcgttctgcccatacaaacaagctagctattagagggtggttggggtatgctacttataatatatgatatatatttccaactgaaatctcaatgttctcaatataaaaaacctgaaatcaggtgcctattacggaaagtgctgttcacccagtaaacccaaaaaagcaaatggataatgctggccgttttacctttctgacgtttccttgggtatctgcaagaacctccccttttgcctcccccaaataagatcttttaagtgtgtgttaaacaactacggaatactaaaaaaaagtttggcaaaccaaaaaggaagaagaagaagagaagaagaggaagaggaagcagaagcagaagaaggagaagaagaaggaggaggaggaggagaaggaggagaaggagaaggaggaggagaaggaggagaaggaggaggaaattgttttgtgtttatacaatgaattatacctactcaataatatgaactactaacaagtgaaaacaagaatggatctcaaaactgttttgttgagcaaaataaactagaaacaaaagtgcattctgtataattccatttatgtgaagttcaataacaggcaaaacagatctatggtaatggaaatcaatatagtggttacctctggaagggggtggcatcacccagaaagagacataaggaaactttctggagtgatgaaaatgttctaatctttttctggatgatggtcacgtaagtttttatctatgtaaaaaaatgtactgatctattcccttcagattgtgcattttactgactgtaatgcgtaactccataaagcaatattgtaagaacataagagacaaaaacagagacataaattactgacagcatgatagactatgtactttaagaaatatctagatgctgaataaactacaacaattacacatttaaatgcaagtcatggcagaaaggagaacgtaaaaatacagagagaattgaataactgtgtataagtagcaggaatgtacaagaaggaggctagaagctaggaggatagggggaaagttgaagagaaatgatgccagaaagcatgacagtgagctggaaaatatttctagccagaaatccatagagcaagaaatggtccgttgatatttacatcaatgaaagctgtcagttgttacacgcacatgctgtaaccccttttgttacacaaacctttatgaaagtatgccagacataacttttattaatgatgatttgagggaaattaaagggaaaactaaatatgtagcacacctaggatgatataggcaagaaggaaggaaagcaaccataaggtctgtgtgatagtagggaaagaagaaaacaaccatccatcttataccatctgaggacacagacaaaaggcaccatttattaatgaaaaggctgggtcctgaccagtcactggatttttcagtcactagtactgtgtgaaataaatttttgttgtttattagctactcagtctatgcattttgttacagcagcccaaacagattaagacaggaggcttccacccaagtagagtgagaagtaatacatgctaagaaaggttggtgtcattgatggaagactggttacatgtggggagattgatcaaataagtaaatatattaagtatattgagagctggttcctcattgttagaaaagagaattataattatggaaaggaataaaactagcaggaaccctgtgatactggactgaaattggaagcatcatggttttcaatatataatgatagatgtagaaataaatatatatgtataattatggaaagatatatatcattcctaactctatcccctgagagggtctgagatcagcaacacttcactagctatgagtacaatttgtaccaatgtgtggtttctaaaataccactctctaatgaaagaaaccagggctccttggagaaatggctgatttcagggctggggtagagaaattacaagataagcctagaatatcgtgctaaaagacacaggaggactcagagaacgatgggaccacgtcaaaaggacagagaattcagcttaaaggggttcctactgaccaaatcaaagaaaatttgagcagcaaaataaaaatagtaacaaagtataatccattgaataaaataaataaatgaataaatgagaagttcaaagggaaacacattatttacatattttcaaagtccctacccataaaatacttatttattacaaagttaaaaatgagtaaatttaactggacaatcctggcagagataatcaaatgattaaagtaaacatcatcggtagcaggacaaattgaaatcatgcatcatctaataagatgctgtgaaaacacagcatcattcctgctagatatgcataacctgaatctaaccgtgaggaaacttgatgcagacccaaacagaaagatattctacaaaataactggccagtaattatcaagagtttcaaggtcatgaaaattaaggaaagtctgagaaactggtccacattgaagaagtgataacaactaaattcgaagcttgattctgaattataacttctggctataaagcatattattggagcaactggggtaactaatgggatctgaggattggatggtaataatatgccaatattaatttcctgattttgatgatatattgttgttatggagaattgtcagaattggcactaaagtatttggaggcaacgggacattatgtcagcaacttactctcaagtgtttaagtttaaaaaatctgcatatggaacttttttggaagtttgcaggtgtttcaaacttttttaatgaagctttacagtgagccgtaatggtaccactgcactccagcctgggctacagagtgagaccttgtctcaaaacaaatggcaatcatgagggattgttatttaaaaagaaaagaaaagagatattttaaagataataatgttaagagttcaattaaaacacaagccatagagacacaatgtttggcagtctttctcagtaatggtctcttgagaaaattaaattctataaaaaatatcatgaatgacttcttaaaaaattctcataacaatgttatatagctaataccatttctagatgcaatggtgagatgttaatccattacacacacaatggtgtaaagtaatggtaactttacaccattgggtatattttacacaatggatacttcacaccattggatacttcacaccattggatacttttacacaacggatgctttacaccattggggcataattcctttgtggtattcagaatagaaagcttaggaaagagaaaagggttaagaagaaagcatgggttcctggcttggaaactgtgaagctgggagttctatttactgaaattagaaacacacatattccccctctttttggtgtagaaagttcttccacatctaatgtactggttcttgtcctttctgcccaatctacctgaatggcccaccaccaaactagctcctcatgtcctaaaacaaagttcttatttttcattcttctataccccatctctaccctcagttgattggactttaccctggagatgacaggaagccagtgttttgtaaccatctcttcaaggtcggggtctatatagatgtacttgtgcaatctcacaccataacacagtgcctgccacagaacaggtgctctgtattgagtaaataatttggaatgcattatttatgataactaaaccactggggtttttttaagcaagcaaatgacaagatttgtatttacagggattactcaggctacaatgtacagaatcttctagagtaggatttctcaacctcagcactattgatatttggacttgataattctttgttgtggagggttgttctgtgcattgcaggatttttagcagcatccctggcctcttccaccaaatgccagcaacgtcccactgcccccagttgtgacaatgaaaatagtctccagtcattgcaatgtcacctatgaagcaaaattgctcctggttgagaactactgccctagagggaaaagatgaaagatcagtcagatagaggtcgtttactggaaaatgttataggggaaagagggcagtgcacttacattgattgaaaatgtctactatgagctggggactttacatatgttttcgtattttaaagtggggtatgagacaagagaaccccacctccatccccactggcccctgaaatcccttcagggtaacctaaggtcaatctcctaaattattaaaccctaaaacaaacaccataaccttccctggccccatttgagtgcagtgaagtctaattcccacgccatgtcaaagaggagtgtttgacattactccatgggtattaagttattctgggtaggcttcaaaatcactttccagtcagctccaagggggaaacaggcagaggttctttgacacaagctggtcaaactccatgacttgggtgacttcttcctctgcccaagctctcggccatccttggagagcctctccctggggcccatgcagtggctgagccgagagctgaatgctggcgctgggtcagttttcctggtgaggtccaactcagagggaccaggcagatgcctctgcattcgctcagcagtctaacaactcggtctgctcctctgctcccaccaacgcccgctggttgctgctggtattaataacatgagcagcaggaggcttcgcaccaggatcagggctgtctggataattagccagtggcctaggaccagtgagtaaattactctgtgacctgagaatccagctggctaccaccatcactcaggcctgctcactttattgctctcccctcctgctgcactctgtctagtttacattcagagcattgatttcatgcctttttgttttccatcttagggtgagaagtagtcactttggggagactggttctcaggtcagtgggatggctgtagtgacatgggaaagaggaatattggagtttttgttttgtgcaatcatttagtgagtcccagcatgtcagcacctgctctctgtggcattcccaaatgcatttcaatcttttttatcagagttgtgacgttctctaataaactgcatatatatatttgcatattggagaaggaaagggtagagaaaaaactctcacgtcactcccaacttacacactccatgccaagactatcaaatgggaaagtgcattcaagttaattttcccaaatgctgtggtcttcttggagcatttgcacaaactgtttcctttgcctagagcactatttgttctcccttttaccccactttcactcacctttcaagtctttcttagacattactctccccaggaagcttttcctaacccatttggttgctcactcctctgggctcccaaagcatcctattccatattacatgactaatcccagtttgtggcaattacctgttttcttgtctgttacgtctttcagatcatgagcttggtgagaacaagaaccaggccacatctgtaccaggcccccatttaagtagccaatgaaaattaataaactgacatagaaagatatcaataaattctactttccaggcagacctgattcccagctttaacccagccaaggcacccacttagacacccagcagcgttctccacagagttgtcacaagcattctcaatgggaaacctacagcttcagcagaacttccttctcatttcatggaattaccaactgcatctctccctcttttcaactcaccaatttctataaatgcatctgaagataattctgtaattctcatttaatgtttactttaactccataattcatctaaaaaacgcaaatattctggtttggctggttaaactcctttgtaaccttgattgagacatttacgtgcattcagttttgatttcctcttgcgtagaatgaatttgatcttttaagtgccttccatccttaaagttttctgattctaaaatttgaagtatattttgtaaccctgtaccattacaacagttcccactttgctgcaaaatctttttgacaaacgggatatataaacaaaataattaattaaaatagaaatacttttttttttcacaaaggggccataaaggagatcatagttgggcccctgcttattcctctaacctgtccccactccactgctaactacaaactgcttccagttcctctctgcacaaatgctttcctggccaaaatgcttttacctgtgccattccctctgctcagaatgccctttctcctctgtgtacctagcaaacttccaattctgcgttgaaacccacctgtggccacatcttttaggatgtctcttttaacttgggatagagcaccaagcaatggggaagagtttggactgggaagtcaagcagacccaggactctaatttggcccaccaagtgccagctgtgatactatgggaacgtgacttacttgatctgactgagcctcagcctcctcatctgtgaatgggatgatagcagttcctacctcctggggctgttgggattgaatgaggtaactcaagcaaagcatttggctcacctccaagcaaataatatgcacaatatgagtcttagctattattattaattttcccaagttagaattaatcatttctaatacacatttttagctgcaccttacatttctgcctccctataacttgtgaccttcttagaagtcagagactgacttactcctatctgtatctccagaactgtgcataacgcccagcatgtaagtagtcaattatacatctagaagagtattcttcaaagaacaagatttagaactttaaaataaaaataaaaagtgtgcaacttgttatgtgataatattccagattggctggggcacttttgtattcatgttcccatttttattttgattctcacatgaattaatatgtcaagtattattatctctagttcacaaatgagagagcagaggaccagaagaatttggttttgggccagagttacagaggaggttgcagaactcaaacctgtatcacttttatcccctcttatgtttctcttgcccccaaagaggaatagctaaaccactctttttttttttttttttttttttttttgagatggactttcgctcttgttgcccaggctggagtgcaatggcacgatctcggctcactgcaacctccacctcccaggttcaagcaattctcctgcctcagcctcccaagtagctgggattataggcatgcaccaccatgcccagataattttgtattttttagtagagacagggtttcaccatgttgatcaggctggtcactcttaaatctcaggtgtaagattttaaacatcgataagtgatctgacacccagcacctaatgaaagcaggtgccgggaagggggacccttctctgagatgccatgcccaatggtgaccacagtcctcgcttctcaggatgccctggagatagcatgccatgtgctgtacatttagccctcagcattcagaggggacattgctttctgtcagtgcttcagactccttcagcttttcctgtgcttttgtgcagctgagaaggtgaagcatacgggtatcaaaagctgcaaacagtccctacctctggaggcaggcatttactaggagaaagaacggaccaatggcttcccagagcattgttcagccacattagagaaaggattaagcagatacattcagctattctaacagattttctttaagccttgaatacgcctctcacactcactcagataatcacattagttttgtcattaaaagatcccttttatagaaagtacctaaaccgcttaaaccacccagagaggttgcatacattatcaaacaccaagacaaacaaaagggattttctgtcccacatctcagttttcctttttcctcaaaaaatttgggaaattaaggtagaaatgattttgccaaatggtcagtggctgcagagcaaccctcactccttccttccctggatagtccctctgcaatcagaactgggaagactggaaaacaacttcagcattgaggctggcagaaaacagtttagaatgagatgaagacagcaagggcaaggagggggtagaaaggagcgtgcttgcctctctgccacaggaaattgcatttggaactgaaaaagagtagaaaagcacaggacttggaatcaggcaactaccacttactagatctgtggtcatggttggggagagaagggagtcacttcatttatcttgcctcacggtcctcatttataaaattgagacaatacgtatttctcctctcactcagggtgtttgtgggactaaaatgagaaaaggtaagcagaagagttctgaggtctataaagtatgattcaagcattaaaggggagattttatttgtttcttttttaaataggcctcatgatagaagctacgtgttttggggtttgttttgctttgatttttcacagtaatgtgtggtgcctaactactggcatataatgagtgcttagcaactttttctcaatgaatagtgcttttactgtctttccctcaagtccccaaccatactgcaaactctcatccctcaaatcgcagtttgaatgttgcttctcctttaaagccttcctcagaactttaggaggagttcatcacatctgcattcacactcccacagcatcctgaatgcaacacagattcttagcccaatgtgtgtaatcatctgacattgtgactgtctttccccatgagccttgagctccttgagaacactgagctttacctttaaacagttaaactccttaacactataccttcacaaagttgccgttgaataaatgtttgagtgaatgaatgataagtaaacaaacaatccaaagaattggggttatttggcctagaaaagaggaagtatctcaagaatcagtccccaaaattaagtttattaaatttgcagattaatgtctatactagacgttgtgctattgcgctgtgtagaggataaagtgtaaggctattgagttaacaatcagtttttcatttcgtatgcagggtaaaacttgaggaaagggtcttaaattatgatgggaaaaatttagattcgacctagttaacatcgacactattgccacttggggccagttaattctttgttacgggggagctgtcctgtgcattgtaagatgtttagcatcatccttggtctgtatcagggatgtcgctggcacgcccccaccccagctgtgacaactaaaaccatctccagcattgccagctgtcctctaggaggcaaaattgctacaaattgagaaccactgttttagatctaaagaacaaactcaggtgagggttctgtggcatcagaaaaggagacggaagagatggtagatctgaatgtaagctcgttgaagataaagcagatgggtgttttactgatttatattttacctttgaagggaggtagattgaccaaatgaactgacatcatatggtaacatatgaaatgtcttctgttaaccataaaagagacttctgaaataggaataatctgatagttctttgatgatgagaggccatttatcaaatcatctggcttcttccacttctgtaaatttattcaaggacacttactgtacattatcagtgtcatggcacttcctattttttattttttattatactttaagttctagggtacatgtgcacaacatgcaggtttgttacatatgtatacatgtgcgtgtcatggcactttctatatctccttagcacacagcttcatttagagtttagtatcttggagttattgattgacagttttttttttaactttctttctttagctgtgcatccctacattttaggagttacaaaacaaagaaaaacagttaacaccactccaccaaatgaatagaggaaatttagtaaagatgtcaacctctctgtattggaagaagctccttgttgcttgtcttgaccctgcctcccatcgctgaggagtctagttcacctctaagccaagtaggatgagagtatatttggtgtctgagctcatttttgaatctacttcatttgtgttaccacacattattcattccccctgttcaactatctactaagacatttaaactggccaagaaacatctatctagcaaaattttggctgagagtgttcctccaaatagaataatctatttctaaattaaaccagattagcaaaaatgtgtacacctgtaatatagttcctttgttcactgtaaaatcattgttatactctggtgttatgactttcgtttatactgaaagaatgtacaagtatgaatacaatgaaatctataaatatgtgaagagagattagagctcccactcatacttttcccatttctgaggttcttccagtaagttcccgcgtgggcttctccagattaattggtctgtttttatctgctgcacagagtaaactgtttaactgcttttatttttgttttctgctagaaagcttagagccagattttcttagccctcatcttcagaaaatatgtagacttctatggcagtatttcccaacaggtgctcagcagagcactagtttctcaaatgttgcatttaaagagtttcagatcaaataaatttgagaaatgtcacattcttgttaattcacaatgagtgaaatgttacatgaaaaagggttctggatcaaataagttttggggaaaaaaaccttagttttggaaagtttttttattgtttcacaatgtttatagcatattaaaggtttgagagatttggtaataaagataatctgtttaaacttgtttcaaccattgcccatgttcaaatacttttgctcatggtatcccttttttatgtaacacctgctaacatctggccttaacagcattctgcagaatccagttgataaatcccgccttatggtttccattcctagatccattttacatctctaacccttttaaatctcttatgtcccacttgtgctgtgttcagtgtatatctgttttgtgtgtgtgtgtgtgtgtgtgtgtgtgtgtgtgtgtgttttgagatggagtcttgctctgtcaccgaggctggagtgcagtggcgtgatctcggctcactgcaacctctgcctccgaggttcaagcaattctcctgcctcagcctcctgagtagctgggactacaggcgcgtgccaccatgcctggttaattttttgtatttttagtagagatgaggcttcaccatgttagccagaatggtctcgatctcctgacctcgtgatcctccagcctcagcctcccaaagtgctgggattacaggcatgagccaccacgctcagcctcagtgtgtatctttagatcatctgaaatcctttcagaacaaagtgtgacaaaaatacatgaataactaataaacatgttgagctgtatgactttgtgttgggattcactcaggatggtggcagaaatattaaagggaaatattagggaaagttatagggaatagtcacgaacctttttggaaggccgaaaggttacatagcttctaatagttgaacaggctgaaggcagccagttcttaccttacagcattaggtcatagggtaaatagtagggacaatagaggcttccccatttaagtctgtttaccttacctccattaactaacctttgaaccagatggccctctccaaggcggtgtggaggtctaccaggaatattgccccctaatggtatttattttaaaccgcagtacctgagctttaatcattcgtggaactactctgttaaccacgttaattatccacaagtgtgtggactcaaagcttctgttgttaattgtatactaaataaatgcctgaagtgcgagctgctcagggccggccacagtaacaaacctctcttggtgtgcaggcagtcgggcactcagcaggactggcaaaacagaatatctgtgtgtcagtgtacgttttattcatctgtcctttaggccagggtctgcaggcagaaccccacagctaatgacctcttgtgagaagcaatacctcaaccttaggcaagtaactttcacatttgagtttcttgttaaagatgttagccacattaaacaaacacaaagagataaatgatcccaagattgctttccaggtctgctgttggaagattctatctttccattcccattactaaagatagcaaagtttattggcaccaaccccacaccccaccacatccctttttttttcttttttttttttttttaagacagggtctctctctgttgcccgggctggagtgcagtggcatgatcatgggccacagcagccttgacctcccaggttcaagtgatcctcccacttcagcctcttgggtagctgggactacaggcatgcaccaccatgctcaactaatttttttaaagaaattttttgcaaggcaatacatgatatggcccaggctggtttggaactcctgggctcaagtgatcctcctgccttggccttccaaagtgctggggttataggtgtacgctaccacacccagccccaacccattctttgactccttgaatggctgtgttcaatgttctgttcccacctaacatcaaggcaaaattacattcaactaccttgacagagagttccagcctgatagagtggaagagggagcccggcacatgcagttcaagtgagggtaaatcagaaagtccaagtttcagaggtactgagtactggagatcccctttccaaaatccagggaagccaagggcacaaggttacatgggcacatcagagctccgaaaggtacatggctatagaaagagatcaatagaaatcctgatctttctgccctaaaatgtattcattaaatataaatgtatggagggcctactgtgtcctgcctgccaggacctgtgctagattgctgatcattagaaggaataagatatagtccttgtcttcagagagcttggttttcctaaaaacaggatgagaacactaagcaaaatattataacttaggatatgtataccaacttagaggtggtcaggtactgtttacagtgctagaaaagaagacagacaatccccaccttggtggagtttacattctagcagacacactaagtgtaagcctggttctgtgagagcacagacaaggaattacttcctttaggaaagctgggagagacttcagagggaaggtagtcaaattgttccaggctttaaatgatgcacagcagtttaccagtaaaaaaaatattggaggttggtgctgagaaaggaattttagacagaagagcagtatttcagaattatgagaagtttggtatacctgaagtgcagggttattaggaaagtgaagggtggcagtaaaaatgggaaatgagtccagagaggtaatttaaggaaaggctgtagtggggctcaagtggtgtcttggatcagtggagtcctatgcagaggaattaggatgtttgggtatttctttaaaaagtatcaggttaaagacagtacactatagctcctgaagtatgtttctcaaacactagctccttgagctcatgctctgattgccatctactcaccatgactctccagcacacactgagtcaaattccattgactttccttactaaatctttctccaattttcccacttctcctcatctccatctctaccactctagtcaaacctaccttcttctcttaacttgacaactgtgactggggtctcctaccttacttgcttgtcccctacaatgcctactctactctatagccagagtagtccttttaaatgaaaatctgttcgtgtcactcccccgattaaagcccatcaaaggtttttcatccgcataattctacttgaatgagcattccccctgcccatgtctccatattcaccttatgtcacattctctgtggttgtttgccttcccattgcaggggccttctttcagttccttgaatatgctacactcagggcttttgcatgtgtcatttactccactcctcttcctagtatagttcccattcatcgtttagatcacagctaaaatgtaacatctcaaaaaggcactgctattcccccagactaccttacattgtctaaatgctaaacatttaacatttagtgttatgaagagttggggccattagattagaacatttagcaattaatctctattttcctattagattgcaattaatgtcctaataagctcaactcttcgtaacatttataattgtaccaattcattgtataacttgacatttcgtgtctttctcccagcagaacacaaaccttattaaattaggtgctgtgtttgctttttcgccattgcattttttaggttttagaccaatgccttatgcctaggagatgctctgttaagaatagaaaaagctggccaggcgcggtggctcacgcctgtaattccaacactttgggaggccgaggcgggcagatcacgaggtcaggaaatcgagatcatccttgctaacacggtgaaaccccgtctctactaaaaaaaaaaaaaaaaaaaaaaaaaaaaaaaaaattagccgggtgtggtggtgggcacctgtagtcccagctactccgggggctgaggcaggagaatggcgtgaacctgggaggcggagcttgcagtgagccgagatcgcgccactgcactccagcctgggcaacagagcgagactccgtctccaaaaaaaaagttgtattctcaatcaccattttggagagtcacatactatttacagataaacgaagcaactatttaacttcatttgtcccattattttccacacttgctcaactataggtataagtctttctactacacaagttattggcattttgttggatacctgtgctccaagaaacactgtgtgatagatgtcgtgtgattgagttgcctgaactgcttccccaatcctaagaagtacacctttgtaaccatgttttcatggccctgttctttcctaaccacctgagagttgtgcatttgtgaggtattgctccctcagagggtcgaggacaccattctaagaagtcattatgggcattgtgcgagtagagaaaagtaagctggtctgtagagggagaataaagcagtcatgggaagagaagcattaggcagggctcccacactcaaatgagtcaggcaggatgacagaagtaagataactgaattcaaattcaaattccagattctttcaactaggggctctcaaaagtgtgatgctccagcatcacctgggaacttgttagaaatgcaccttcccaagatccaccccaagacatgttagaaactctgggatggggctcagcaatcagcatttttacaagcccttttgggtaattctgatgcacgctttagactgcctatcgaactgtagacatctgacgaacaaatccaaaccacagtctgacaatgggtcacctctgttgaaagtgaaacagaacacagcagtactgatttttaatgactttccagaccctagttctagttccccatgattcctggtaacccaagtcctggagctgatctggcagtttcaaaacatttcttttccttaagctggttttgtgggcttttgttgcttgaatccaaacaaaaataaaactgtaccagtaaaatgaagcaaacaaaatttgccaaaaaggagccccagttctgccccagttttgccaaaaaggagctgtgaggccgtagataagttccttctctctaagctacaattctatcccttacaaaatgatgcagttgaactggatatctcaggggccttcaccctctactatgctggcttagacactggctcctctggataacctcttggcgctacagattccttatgaaggttctcctaagttactttagttctacccattgactccaggcagttaaagtaacaaaaacagaaaataaaaagcacccaattctttctaagctcttgggagctgaaaaaaataaaaatagaaagcactcaagtctccatgtctctctttccctgtcagtaaaaagtgcagttttattagagggatgctttaaataataaggcttatctgacactccaattctttttcatgttaaaattaaaccttagcatattataattatactcacttcaattaaggctgctatctatattcctaaaatgcatacagtaataggatacaattatgcttgccaaaaaattctattttttgcagtttgtttcttcagaataatgtaactcatccaaataatcaacatcaaataaaatggcaaagtattttaaagattctacacaagggaaaaaccctaaaatcgtaaaataaattgtaagaatatcctctattgagcccataaaccctgcattatttaatttcttagttgacaaagaataaaaactagtattgttttggcccttaaattcccacccaaatcgattgttctgtgatgctgaaacaaaatagttaccaaatgctttgatagacaactcattacaatgagaactgaaggctcccaaaataagacaaagattttcctgtatctcccagatgccagggaaagtaaaggaaatatttcagctttccatcccaagaatgaactctatatatgcccttaaaaaaaaaaaatgccataaaaatgatcaagctcaaggtacagttttttaaaagcagaaaatgttcccaaggcagggtgaagaaaaaaaaattattgagagaaaatgaaaagaaacaaggaggaagaaatctttcaacagagtagaaactgttagtctctctctctctgtctctctgtgtccctgaaaggttttgatccaaccctatttgttatcctagaaaagctctctgaagaaaggtctcagtgtaagaactgcttgaaagaagccaaccccttggaaataggaatggcttggccatttattaatgtcaaatatgctgcctgcatgaattagtcagcttgtcttttggaagtcatacagaaaagttcttgtgcacctgcctgttagtgtctaacacttctggttttaatgacagcagtaacaactatcagaaaataaaattttaaaaatttaaaagctgaatattactatattctacttttggaatagctgattcatcaatttttaaaggcttcttactgaaatataattagtgactacagcataaagcttgctcagatttaaaaagacaaaacagagtcattttcctaaactggcagaattcaaacaaattaaaactgaccttagaaacaaagagaaatggagcagaaaaaggccagatttcttactggcagtaccacagtggccaacatcccagaactaagaaaagctgccaagtggaagagaaaaaattaaaggactttccaaaaacagctaagcccagtgcacacagcatttccatcagccggagttgaagtgagcttcagaagcaacacacaggtataaggtccagctgtattatttatttacagcacagttcaaagtcattaaatccggtacaaaagaaatggctctcacttcctggattggcaccagacatcctaccagctgcaattacatcattttttatctatcttctgcttttactttgtgtagggtagggatggggacttacaaatgggccaaagacacttcaacctcaaaaccaaagagaaatctctgcttgcagagatacaaagaaagtaactctccctcttatgaaaagcaaccaggaactctactccagttatgagggccactgatggtgtgggagagctatcaagaagattcttcctagacgtggtgcaaagacagtgagaacccaggaaatcacattcatgggacacttgctcttaccgtcatcaccctctattctatctcaactttggccccatcaaatctaatgataaacaaaagaaggtaattacatgtagaaaatcaaagtgaatgggaatgtggtggtgtgaacataaaagaagaaattgaaaacaatcaaaagtttctcagtgctgctttcccgcactgtcatagaaatctctgatccaattcttcatatgtctaacttccaaggagcgggctaacagcacagacataggatccaaggcattcttggtgcggagatctaagtggtgggccccctctgagatggtgactgcaaccagagtgtctgtgatatccttagttactccacctcctgaccaggggtctagttcaccattgctgcaagtgaaaaaaagaagaaaaaataaagttgttagtttttcatgttaacactcagataagctagaagaaacctattacatgtttaacacctaaaattataaacttgtaacctgggggatttgatctgaggatctaatttatcatatggatagatacttcatactggagttttgcaatattcatgcaaccaggtgcaaaaaaagaaccagagataattgaaggaggcgttcccacaaatcaacctagactgtactgggatatgaaatttagaaacctgaatttcaatcctgatttcattattcaaaagttatataatgcaagttacctgactcagtttcctcatctgtaaaatggagataacatgccaggcgcagtggctcatgcctgtaatctttgctctttgggaggccaagatggtgaatcgcttaagcccaggagttcaaaacaagcctgggcaacatggtgaaactccgtcttctcgagggagggaagaagggggaaagggaggaaagaagaaagggagggagggagggaggaaaggagaaggctgcattttttatctaatatagtacagtactttgggaaacaggatggtagatctaaaaaatgtcaccaggatctggaatccgaaaatttgggcattacacgaaaatcttcattttacattagctttaaagttaaggaaatgctactaggtttttagtctcagctggttcacacaacacaattcagaataatgtaaagagaatcagtcactgaaactgagtatctactttcactgagtaaaaaatccaatacaaccacagacagcatccctaataatatttctgaacagttttgttgagatataattcatctaccacagaatttgtccatctaaaacacataattcgatggtttttagtatactcagagttgtgcaaccagcaccacaatccattttagaacactttcgtcaccccaaatagaaacccatactcattagcagtcactccccatcttcctgccttgctctcagcctcaggaaaccatgaatctattttctgaatctatagatttgcctattctggacatttcatacaaatggaattaaatagtaggcggtcttttgtaactggtctctttcactcagcgtaatgttttcaagtttcacccatgttgtggcatgaatcagtacatgttcctttttattgccaaataatatttcatttatggatacatcatgttttatttatctcttcatcatttgatgcacgtttgtattgtttccactttttggctaatgagtactgctcctttgaacattcacatacaagtttttgtgtggatgcatgatttcacttctcttaggcatatacttaggaatttctaggatatatagtaacaacctattaattagctaccagactactttccaaagggactacaccattttatattcccagtagcaacatttgagggttccactttctctacatcttcaacacttattattatctgtctattttagacatcctaagctagtaagtattaaatggtatttcactgtggttttaatttgcatttcccaagagactgatggtatttaaacatcttatgtgctgattggccatttttatatcttctttgggaaaatgcctagtcatatctttgttcattttttaactagggttatatatctttctatttttgagtgagagctcacactctcttaacttgtgtgttgtagagtaacaaaagcatgagctttgggatcagacacactttggttccaatttcaggtctgcctctcatctgcctaatctcatggaaacagattccttaggcaaaaaactggcactgaaatacctggatctaagtactcagcccattgcaagcattagatcattttccccttgcatggcactcttggcatatctttacccacataccactggaaattacttatagaacatttttatgggtgtcctaatatttgtttaatgcaaactccgttttgctggtattgtttacaaagccttatctattctagatacaagtcccttatcaaatatatgacttgcaaatattttctcccatcctgtagactatcttctaactttcttgatagtatcatttgcagcacaagtttttcattttcatgaagtcgatttatctattttttctcattgtttatgtttatggtatggtatccaagaaactggtgtctaacccacggtcatgaagatttgttcctatgttttcctctatgagatttatcattttagctcttatatttaagcctttgacctattctgagttgatttttttgttatagtatgaaatagggagccaacctcattcttctgcatgcggatctccagttttcccagcatcatttgttgaaaaaactattcttttctcaatgaattgtcttgccacttttgttaaaaatcaatatgccatacatataaggtttgacttctggacactcgattctcttccacttgtctatatgtctatccttatgccagtatcacactgtattgactgtagctttgtaataagtttgaaatcaggaagtgtgagttcttcaagttcgttcttccttttcaagattgttttggctattctgggtcccatatattcctatatgaatttcaggatcagtttgtcaatttctatttttttaaaaaaaagtccagctggaaatttgacagagatcacgttgaatctgtggatcaacttgaggagtatagtcatcttaatagtattaattcttctaatacataaatatgagatgtctttccatttaaaggaagcaatttttaatgtctttgtttccaatgtatatatcttgcacttcttttgttaaatttattccaaagcattttattcttgatgctatttaaatcaaatttttccctagtataacatattatgcatagattgcattcgtgtttacaaagcctttcacatttgttcattgtaacaaccctatgaagtaggtttaattacaattcttttataaaagagaaaactaatgcccaaagaggttaaaaggcttgccaaaatcatttgatttggcaaatctgagattcaaacacagttctaaaaaccctagtccaatgcttaattttacactatgttgcatttcagcggaaccatgactgctgttggaagtcgacagcttacactctcttgtgtgctgcaaagtaagaaaagcataagctttgggatcagacacactttggttccagtcccaggtctgcctctcatctacctaatctcattgaaacagattccttaggaaaaaaactgtcactgaaatacctggatctgagtattccacccatggcatgtattagatcactttccccttgaatggtacctctcggcatatctatacccaccacttgaaatcacttctagaacattttatgtgtgtcctgatatttgtttaatgcaaactccattttgctggtattggttacaaagcctgaaataaaaagtcttcaagcccacattatcaaatacatgaaaataattcccataatttgcaaaatcatcaaaaaatttctcagctataagtacaacctatatacagatgactaccaaataatgtatctagccaggattgttcccctaaacttcagaaccaaagttcaatggtgtacttgacatttttacatggaagtcaaattagacacttggcagttcctgatgctccccaaatgccaaccagctcctcctgccatcttctccaatctctgtcagtgggaagtctatcctttccattgttcaggccaaaaagtttgatgtcactctttaatctttttggtctcactctttaattttctcattgtttaacacacaatctgtcaacaaatcctgtcatctatatcttcaaatatatccataatctgaccattttgtattacctccactgcacaaccctgatccaagtcaccattatctctagcctgagttactataatagccttttaactgatcttcctgcctctactcttgtctccctacaatttaatatcaatagagcaggcaacttgatcctgttaaaacctgaaccagataatgtcattccttttctcaaaatgctccaagttttcccatctcattcacagtaaaaacctaagtccttactagaaccaacaagtttctacatgattcaggccctctgctccctccctgatttcaccttctattactctctcacttactaactccactccagccacactgaccttactccacgtgaagaagaacatgctggggctctttcaaggcctttgcctttggttaatcctcttaccccaccaacctcatggctagctcctttacttcctctatatcattttttaaaagtcaccccttgatgaagtcttccctggtcactctaataaaaaatttcaactgttttccctccctatgacattttatagtccccttccccggtttacttttttctccttgtcactcacatccttctaacatatttataagttctatcttgtttcatttcctatctctcaaattagaactccatgagagccgagatttttgtccatattgtttatttctacatctccaagttcctagaagcagacctggcttagaaaaggaggcccaaaaaatttactgaatgaacttaaaaagtgtctagttgtctgtggcctcatactggatgcccatcatagacatctataaatacacgtatgcaagttcataaacatgttgtaaatcactttggtactttttacgtgggaaagaaaagttgatataaatgattaatagaaatataaagagattaaccttcagctgtgtgttaatagtggaaagaacaatgaattaattcagtagatctacgttgtacatttttactagctgaatgactttgggtaagttactgacccctgtgaacctcaattctcactggattatagaaaaaaatgttttttaagaaagatagtacccttctctcagagaactactgtgagacccaagtcaaataatatatgtgaaaataaataaactataaatactatacaaatgtgcgatgtcattatagttattaccatactctgtaagcataataagtattaccaccaccaagaggtaaatgaatcatgaaaatgtaaatgtacaaattatatgagaaaaaaacatttaggtacattaagtatatgtgtgtttgtaatacaatctaaaattgcctgcgctggccaggcacggtggctcacacctataatcccagcactttgggaggccgaggtggatgggtcacttgaggtaaggagttcgagaccagcctgcccaatatggtgaaaccctgcctctactaaaaatacaacaattagccgggcgtggtggggcatgcatgtagtcccagctacttgggaggctaaggcaggagaatggcttgaacccgggaggcagaggttgcagtgagcccagatcatgccactgcaatccagcctgggtgacagagcaagactccatctcaaaaaaaaaaaaaaaaaaaaaaaaaaaactacactccagaagtgtacttttttggttttgttaaaaacaaaaaggaacactcatgtaaaatagaagccttagttttcaactaccaggtaaacttttaaagtaaactacataaggagttggattctcttaaattaacaaatcgcctttatcattattccaaattgacaagcccaacccagataggaaactctccattatttgcaaaacaaagaagctatcccaacagccacataataagcaaactgcatttgatttaaaaggtcatctgaaatagcctagtggcttagcaacagtgtttggagttgctgagagacctaagatgcacatggacttgaatttcttggtcctagacatgtgaaagctaaaccagtcattggaaaatctacaaaaaaaaaaaaaaaaaaaaaaaaaaatcctggctttcatgagaggatctagatgcctgggtaaaattcccccaacagggagcttcacttagtcactggcaacaattaatttgcctgagaaattatgttaaactaaccagctcctcagggactcccttttggatttatactaaaataactgaaaatgactattggtaaaataatgcctacaagttgggaaagacaataaaactccccccaaaaagcaactgtggaataaaaaaagaattgctgtaatgagactattaacaggtaaacaaatgtttactgattgcctattatatatcaggcactgattgggcacgggactccacagtcaacaaaacagacaaaatctctgttgcttacttccacaataatttgttccttgaaataaccctgttaggtactcattattattcctaactaatatgaattggcaatttgcccaaggccacgcagctaattcagggaagaagaaaaatggcatcaaggtctacctgacttcaaagccttaacagaaaaatctccaatccaacagttaaagattaaacttcccaaccggaaaagcaatcacacttggattcatgtgaggcagcctaaggagaggcctggaaacaaagattaagatactttccacagggctccttggacactttctttttttttttaattatactttaagttctgagatacatgtgcagaatgtgcaagtttgttacataggtatacacatgtcatggtggtttgctgcaggcatcaacctgtcatctacattaggtatttctcctaatgctatccctccccaaccctcaccccccgacaggccccagtgtgttatgttcccctccctgagtccatgtgttctcattgttcaactcacacttatgagtgagaacatatggtgtctgattttctgttcctgtgttagtttgctgagaatgatggtttccagcttcatccatggccatgcaaaggacatgaactcatcctttttatggctacatagtattccatggtgtatatgtgtcacattttctttatctagtcaatcattgatgggtatttgggttagttccaagtctctgctattgtgaatagtgctgcaataaacatacatgtgcatgtgtctttttagaatgatttttaatcctttgaatatatacctaggaatgggattgctgggtcaaatggctctagatcctggaggaattgccacagtcttccacaatagttgaactaatttacactcccaccaacagtataaaaatcttcctatttccccacaccctctccagtatctgttgtttcctgactttttaataatcgccattctaactggcgtgaaatggtgtctcattgtggttttgagttgcatttctctaatgatcagtgatgatgagctttttttcataagtttgttggccgcataaatatcttcttttgagaagtgtctgttcatatcctttgcccactttctgatggggttatttgtttttctcttgtacatttgtttaagttccttgtagattctagatattagccctttgttagatggacagattgcaaaaattttctcctattctgtaggttgcctgttcactctgatgataatttattttgctgtgcagaagtctttagtttaattagatcccatttgtcaattttggcttttgttgccattgcttttggtgttttagtcatgaagtctttgcccatgtctatgcttggacaccttcttactcagcaaccagaaatgtttcacagctagtggtcatgaagtacacagaacagacacacctatggctgttcttttactttgggagtgctgtttcttcagaaaagtaggagaattttgaattttttaattacttaatttttgcattgtatttctcatacctaccaaactatagaaaaagatttctttgtagaagtagacttgccactgctaaaagataaaccagcatctttacacagtcttgcctttaaattttcacatgcttctgaagccttcctgagctgtgtatttcattcatcatccttatcaacaaccggcacatttactgagcattcattatgcgccagtcactgtagcagatgctaaagatacagagatgattaagatgaagtccctgccagtgataaattcacaatctcatggggcagatagaaacgcaaacaggtaactaccacatggagtgataagcggtatttacaggtgctagtagaagtaagggggaagtggaaacctatcctcccttatggaatatttcttggagaaggtatgaatcttaaggaaaatggaaaaagaggatgagaaaggacattcagggaccatttcatgccagttagaatggcgattattaaaaagtcaggaaacaacagatactggagagggtgtgaggaaataggaacatttttacactgttggtgggagtgtaaattagttcaatcattgtggaagatagtgtggcaattcctccaggatctagagccatttgacccagcaatcccattcctgggtatatactccctttatgttctgtggctagaacataaagggcaaggtgaagagtgtactttcatttattcattcaacaaatattttttgagcatagatatttgccagatctgggccaagtactttgatgggctaactcttttaatgcatcacaacaactttatggggtgagtggtattattattctcacttcacaaaggataagactgagaatcaaaaaagcttaagtaattttactcaagacagctcattctacctttgtatagctcttcttgaaagtcctttcttacactgagctaaaagtttcttacatggagctctaattcctacccacttacttttctcacaaaatatgcccccttctccaatgatgatgataatagtaatgatgatgatgatcatcatcatcgctttgacaatctgagaaagataacataaaaaagcaaatggataactaatatacttgtaaaaggactggaggaaacgagcttcttgcccttccacctccagccatgtaagggtgctgccttaaggtgccatcttgaaagcagagactgggccgtcaccagacaccaaacctgccagcatcctcatcttgggcttcccagcctccgtaactgtgagcgatacatttgtgctgtttatatattacccagtctcaggtgttttgctatagcagtgctagtggactaagacaaacccaaaggcttatatttaggtctttttcaaccctctcagttctttcaagttttcctatttcaaataccataaatttggcacaatttccttaaacatcctaagcagacgtatttgcttaactgtcactttataagactgagctgaagagtatagttttgaagaatcctgttgagaacaaggaatacaacgtaaggaaattaaacaaaaagcagttttacgttttccattaaagtgtctggccttttatttggggacaggtatcctgctggatggaatactatgcagccataaaaaggaatgagatcatgtcctttgtagggacatggatggagctggaagccattatcctcagcaaactaatgcaggaacagaaaaccaaacactgcatgttctcatttataagtgggagctgaacaatgagaacacatggatacagggaggggaacaacacacactggggcctgtcagtgggtggagtagggggaaagagagcattaagaaaaacagctaaggccaggcacagtggctcatgcctgtaatcccagcactttgggaggccgaggcaggcggatcacctgaggtcaggagtttgggaccagcctggccagcgtggtgaaaccccatctctactaaaaatgcaaaaattagccaggtgagctgtagtcccagctacttgggaagctgaggcaagagaatggcttgaatccaggagacagaggttgcagtgagccaagatcatgccattgcacttcagcctgggcgacaagagcaaaactctatctcaaaagaaaaagaaaaacagctaatgcgtgctggatttaacatctaggtgatgggttgataggtgcagcaaaccaccatggtgcacgtttacctatgtaacaaacctgcacatcctacacatgtaccccagaatttaaaaattaaaattaaaaattaaaaaagaaaatagaatgagtctaataagtctaataagagtctaataagaggcctttttttgcaaagtgggcagtgccactagcctaaactcagagtcaacttccaggcaaacagctctcctcatccctaaaagcttttggctatgtaccaaaggccaaatttgacttatttaaaataatctgtagagcacagtggtcagagaggtacttgcaggagcagcaatgctgccaggggcctggggctgggctgtccgagttcccatgtgctaagcccacttgagccacagccacgtccggggatgagacagtttttggtcctactatgagcaagaagaaaaagaagaatccctttatgttagatgaggaaggggatacacaaacagagaaaaaccagccgaagaagtggaaccagaaccagctgaggacaacgatgtagaagctgatgaagacgacggtaggaaaaaagacatttctgatgttctagatgacttgaacttctttaatcagaagaaaaaggagaaaaaaaagacatttgatgctgataaagctgaagaagttgtaaaggatcttaagattgaaagtgatgttcaagaaccagatgaaccagaggaggaccttgacattatgcttggcaataaaaagaagaatgtcaagatcccagatgaggatggaatactaaagacacagctctagccgggcgtggtggctcatgcctgtagtcccagcaatttgggaggccgagtcaggtggatcacaaggtcaggaaatcaagaccatcctggctaacatggttgaaaccccatctctgctaaaaatacaaaaaattagctgggcgtggtggtgggagcctgtagtcccagctacttgggaggctgaggcaggagaatggtgtgaacccaggaggcggaggttgcagtgagcagagattgtgccactgcactccagcctgggtgacagagtgagactccatctcgaggaaaaaaaaaaaaaaaaaaaagacacagctctagaagatgaagacagcaaaaaagacgatgctgtctcattcagcaatcagataggccctgataggtaggtcagaaagagactgcacatataaggagctactggatcatatgttcaacattataaggggaaagaatccagacacagttgcttgaaagaaaaggaaattcaccatgaaacctctacaggtcgtccaagtaggaaccaagaaaactcctttcatcaactttatggatatctgtaaactattacatcaacagcccaaatgtctccttgcatttctttcatttttttttgttttgtttttatggtttttggggagtttttgtttgtttgttttttgagacaagatctggctctattgcccaggctagagtgtagtggtgcaatctcagctcactataacctccacctcctgggctcaagccgtcctgccacctcagcctcctgagtagctgagactgcaggtacatgccaccatgccaactaatttttatatattttgtagagatggggtttcaccatgtttcccagaatggtctcaaactcctgggctcaagcaagccatttgccctggcctcccaaagtgctgggattacaggagtgagccactgcatccagcctccttgcatttttgttggctgaattgggtacaagtggttctacagacggtaataaccaacttgtaatcaaaggaagattcccatagaaacagaaaatgtcttgaggagatatatcaaggaatatgtcatttaagttatggggctccacccttatgaacagagtagtgcctcataaaagggctggaggaaactagcccttgatacatcaaggaattgtcaaggtgatgtcacacatgccaatcaccagacacaatcctgcagaagggcatccgactctatttcttacagtgtgaaagttgtccttctcaatgttctgttgccagtatcaacaccaggctgtcacgggcaaataagcacagctccatgccaaagctaaccaatttgctaatcactaattttgcaaattgtgttgtggagatttggctggataagtttgccatcagagtggatctaccattgtattaaaaacgagattaaaaagctgccaagttctttggtgagtagttggttggtctgaaatccttgcaagatggcaatgctcaagctggtgatatatccattgcctactttaacaactgtcagagaaatgcgacatggggtaaggagatgccttttaaaaatcattcatagacttctgtaaaatgcaagataaagttttaacagattttttcaaaaaataaaaactaaaacaaataaaagaacttctaaaagaatgacatttacaattttaaaaatagctctggttaacaggtatgtagtggcatctcctatttctatatagacttggggaaattcttgattaacttgttgctattttaatagctgacaacctaatgttcaactcaaaacatggaaattttgaagtcccagtcagatacacatggagtctgctcaattaactctaatgtgaaccagtggcaactgtgtgacttcttaaggaacagtgtaatgtagaaaaacaaacatgggatttgtagtcaggccatgatagaaagctggctttatcacttagtaactaaaacaaagctggatgagctttggcaagtgattgaacacagtgaccttcagtttccttcacagtaaaaaaggggctataaaaactacttcacagggttgttgtgaggatttaaccaggtaatttatttaaagtgcctcatttagtacttggaacagaatgaagtgggcacttcaaaagtgatgaatactgaaaattttttattaccatcaacaacaacataacaataataagacaaattaagaacaacagatgatgctttattttgtgctggagagtttttttaatatttaaaaaattttgttgctgttgatttttaagactttcataaagcacattggtaatagagcaaaaaatcctatctcttctcagcatcctatctttcaaggcataggaaaacatgacaggtagcactgttgtattctatgttgttatattgtccagcatttccctggttctgttttttcagatattctacaaatgttccaccaactgaagtttatctttggacagcaaaaactcacctgaaaacaatgtttgtgtgtgaactaatgtttttgcctccatacatagtagtgatccaggagggccttggtctcacaccccactgttgaaaacagtcatcagaaagttcctttaagttccatgagtgaggttcaaacatgtcatcgacaccattagtacaaaagggcatgactacttctgtgcaggcctaagaagcaaaccaagagagaatccaattagaaaaatgaggcaaaaagaggttaaataaattacacaaagtcataatgctggtaagtagtgaaggcagggtttgaactcaggcaaggcagcttcaacgccctgttctttacttctgcgccatataatctctcattattcttaaaaagacttggccaagaagtcacggaagtcaggattatgtcccttcatagcaaactgcttgatttcacatttattatcacatttaaccctcaaaacaactctgcaaggaaagtttattattattagtctcattgtgcagatgaaggacaaattagactccctttcttttatatgtctataaaatgcttcctttgtaggacttatcaagatctattgaaatactacttacttacttttttactacactagatttgatcatgtaccatttatctttgtatctttgaaacctagaggagtgcctgacacatgtaagaactcaatatctatttggtgattattaaatgaacaaatgaatgaacaagaaaacttgtccatagtatcacagcataaggtaacagagcccaaaactggatccaggttaggtgacaaaatcttgtgtaccctgatttttttttacagcacaactgtgtcagtgaaaagtaagttccacttggggaaattatacatatttacctgatagctccaacccagtgttcccagactgctagttgctgtctctgaaatattcaggcatttcacctggcccgaataattgtaatatacattcagagcttggaaaatattctgcagcagcagtgaatcagatacattgggatttttcaaatactggcacactacctgtcattttagaaagataaatggggaaagagtcagaatatgaatataaaatgacagtttaataacacaaagaagaaatatgattttgatctgatcataaaatattcttaagctactaactgcagtgtttaatttctctcttgggtttaatcccctccataaatgaataaacctcttcaattactccttaggctatagaaataaaccgaagtcatttgcatggtatgcaaagtcctctccatctaccatcttagcttcctctttgctgcctttgctccagcctaggaaaaccattccccaccacaccaggctccttcccctttgccctttctcaccctgaaacactgttttccaactcctctcccactccactaatgcctttgaacaccaactcatcttttacaacactcaactcaaatattacctcctcttcaaggccatccttgcctatgtttccaagttgggaagaattaaacctctcccttcttggtgcctccattataccctgtacctatttttatcacagcccctgtaatgctctacttcactcacttgatttcagaatgtctccctcagtacttagcaaggtatctggtaagtaaatgtttgctgaatgaattactatacttttataaaaatgcaaaatttataaaatctcgtatggaaaaactataccaagttccagcatctgtcgtgtgataaaaagcatatgctgcaactccccagctcccaaatattcctatcactatcctataaaaaatgcctggaatcctagctataaaaatcagacaatattcagggttaggagtaaaggtgaggactgactaaacagagccagtgcaaactttcttgggtacagaaatattctatatcttaatagggttacatgaaaaatgatataatttgtgtatttcatggtatctagatttcacccctccaccaccagaagaagaaccatacacaaatattgaactcttgttaatgataataaagctgaagtatttaagaggaagatgtctgcaatttactttaaaattcattttaaaataggataaattaaaagatagatgaagtgatggataggtgaatatatatgtgacaaatcaaatataataaaatattatttattgaatttagatgttaggttcatgagtgttcattgtccaattattttaacttttccatatgtttcaaacttttcataataaaatgttggagaaaaataacaggcaatggaatcatagctgaataatactaacaacaacaacagctagtaattattaagccttgggtttccaaccaatacaccatgtaatcttcaaagaaccctatcagatagatgattgtccattattttacatgaaaaaaaaaacctgattcttaggttaagtcatcttcaaggtcactcagttggtaaataatagggcctagatttgttcccagctgtctctggttatgaaatatacatcttatccattatgacacacagcttaggaagtgtccacctgtaaaactacaaatagtcccagtggcaaggcaaacccagtaagcttgaatctctattgactctgacatgaattcagtaatctggtccttttccatttcatacggaaaagattatatatataatagactagtcctgacaaaaaaaagactagtccagagaagaagccaggaaaggagcccagtcaccccacctcagggagagagattctgggcagcaggaataacagggcctgggctggggacatgctcccagtcaggaaaggagggtactgagaaaggatgcaaccaaacccagcccctcatcacagttctgcctggcaccagctgccagcgggggaaaaaaaaaaaaaggaaaactgtaaaagagaaaatgaattttcaggaaaattcaatgcctctccccaaatatattctgcaccacaatatttccatggaatgtttattggtactttgtggaaaaatgtttcctagccagatagttttgagaaactgtatattagcaaatgtgaacagttttcctgactggttgttattattatataatctcagatgatttctcagaacctttaacatgctcaaatgtaatatgactttccaaaggaagatggagtgtgcatcattgccaaaagttttcagaactgctgaatgtgagaaaagtcagaaattaagatgttcaaataattggatatatctttcaaaagtaactgtgaggtcataagaataaggaataccagggtttaggatgtacatgaagagagaattgagctaaactgagagctaattaaaagtcaaaatagtgtttattttggcaactctcgatttttcatggtaagtcaaaaaaatacctaacatttgcatggcacttttctcagaaaacattcctaggaaatatgtcaataagaaataactcaagacaatatggaaatcaagaaacaatcataagatatattaaaccatctattgccaacagttgatcagcattctttcctgaacctggacatagattcagctctttcaaaatgcagcacataactacaaagtagacacatggaatgcagagaagcgccttatgttcaaggacagcatggtagatggggaagggcgacaatgcaagctgggcagggggagaggaggtagtgatgtgcagcaacaagtggcccaaaactctggaaaagaacagtagcaagtgagtgtgactcacatgctggcatcagagcccctcttagagcttagaacactgggcctctgtcaggcaaagaaaaggagtccctatgaatagccatctccacaaatagcagttactgtcacttcttaaaagacacaagcatggctggagaccggcactggctgacaatacttgggtttcagcagccccagttacacagagagaacatcatggtcagagacttggcctctgtatgatggaattccaagtccagattaagggcactccccaggcactgtgctctgtgaggtcagatcacccttggagtactggatccagctttgtacacaacttacgaagggcaccgaccaacattagaaaatctagaagagagcaatcgggatggggagctgaaaaacagctgaagcaaccctaaaattgggtcattccccacctttcatcattacaaataaggctacaataaatacccttggggctaaatctttcttatattcttaattgttttcttgggataaattcttaaattactggctcaaaagagatcaacatgtttaaggcccttggtacatcctgtcaaactgccttatagaaaggaagtgctgatttttaattctactactatgctagatagaaagcctgaaaaaatgtcacttaaaatttttttgcaaaatatttgcaaatttaatatggaaattttattttaggtaagtctaaatttcctttctaactcaaagattttgtgagtccaagcatcatcctctaccattaaaaaacagaatctctaatatctctttgcacttccttaacaattttggtagcagagtgaatgaagtttcaaaaaaatactgaagtcatattagccagacctcagcactattcctatgcttatttaaagactagagtaactcaatgccaggcacagtggttcatgcctgtaatcccagcactttgggaggcccaggcagtaggaccacttgaggccaggagtgcaagaccagcctgggcaatatatcaagtcctcatctttacaaaacattaaaacttaaccaggtgtgatggcacgtgcctatagtctcagctactcaggaagctgaggtgggaggattgcttcagtcaggagttccaggctccagtgctatgatcacaccactgcactctagcttgggtgacagagtgagactccatctcttaaaaaaaaaaaaaaagacgagtagtttaaaaggagatattcacatacttttatcaaataactgtaggatgcataaaatacataaatattaaattgaaccatatgaaattctcacatttataagtcaaaaacagtcaaatatcaacaattttgtcttaacctcatataatactttagcttaaccctgataatgtgcagatattactgacgtgacaaaagcaagcacttggcctgttgattgtttacatagaggctgtgatataatcagacaaccatctctgtccaaaatactcaacacccaggtatccctgaacttactttctatttattttgtgagccctagcaaacggcttcttctaaacaatttctacataaggcgtgtcattcctacacatactgtaaatgcgctgaaatgtgaatagctgggactgaggttgctagtacaactactgaatattctttgatggcagggcaggttctttcctcacaataaccaagagagcaccatataatgatcattcccatttcacagaagagaaaacaagctcagaggtctggctacagatacacaatttaaaaaccatgaatgcaagaagcgtatgattgggttttcatgctcacgtgtgaaatggaccaccctcaaacctggttatgctatcagcacattacctgtctgatgtgggaaaaaaaaaaaaaaaaagcactatgaatataggtctcaacccagacgtcaaccacaaagtcctggtataatcatctggtttcccaatattacataataataatagctattattatttataactagcatcaatttagtgcttttactttataccagatgctatgaaatactcataacaaccctaataagcattacaattgttattatacacattttgcaaatgaggaaactacagcacagagaggttaagaaacttgcccaaaaccacacagcaaggaagtggcagaactgggattcaaatacagactctagtaatcccagttactcaggaggcttaagcaggaggatcccttgagcccaggagttcaaggctgcagtgagctaaaatcatgccattgcactccagcctgggtaacagaatgagaccttctctcttaaaaaaataaataaaagaaagaaagaaagaggccgggcgcggtggctcacgcctgtaatcccagcactttgggaggctgaggcgggtggatcacctgagatcaggagttcgaaaccagcctggccaacatggtgaaaccccgtctctactaaaaatacaaaaatcaggcacagtggtgggtgcctgtgatcccagctacttgggaggctaaggcaggagaatcgcttgaacccgggaggcagaggttgcagtgagccgagatcatgccattgcactccagcctgggagacagagcgaggctccgtctcaaaaaaaaaaaaaaaaaagaaagaaagaaagaaagaaaagaaaagaaaaaaacacaaatgcagactctctggagcttccaaccactgtaactatattgcatgtattcaactaaaagctaaaagaaaaataacaacacaaacaatgcttaaatacacctgctgtctcatgcttaattttttaaaacaattttcctaattcttagatcatctttatatttttctaggtttatttgttttggcaaaaacttagaatgaattttgtggcaatatgaaatcataaaacattaaaagtatgtaatagtaaaaaaaaaaaaaacaactgtaaaatagtagagtgatacggcatttcctagaataaagatgaacattcaggaaacagaaagagcattagaaagtccattttactcattccagttttaaagtgtatagaaatagttgagaaaatagaacattcatgcaaccttactaccaaactaatcagatctgcaaccaagtatttcagttctgccctttaatcccacatgcaccagacaaagtaaagataatgatttgtttaaaagttttaagtgttcctacctatgagagtacacatttaaataagagaaggaaaagggggtcaaagaaaattttttaacagaggaaggaaagaagatatgttgggggaaaaaaaaaagaccaatctcctctcagagcatggtccatccacattagagaaaggattaagcagatacattcagcttttctaacagattttctttctctaaggcttcaatacccctctcacactcactcagataatcacattagttttgtcattaaaagctcccttttcatagaatgcacctaaaccgcttaaaccacccagagaggtcgcatacattaccaaacaccaagacaaacggaagagatttttccatcttatgtcattatttcactatatctatctacatgcacagcagcctatgctgaaatatttgagaagttatcagctgaaatgtgattccaaaattaacaaattacagcatcctttaaagttgctctttaagctgggaagaaacctagtagttttcatgctgacagaacagtcaaatgacagaggggttttctgtttcccttttctcttcttccttgtgttctaccagccaagtccatgattatttctgcatgaatgttgcagcttctgttaacagtaaacaaaagcaaatggagtctgagtgtgcaaagcccaaagacaaattaaaaggaacgatacttgaattgacacggaaaatggcatttagtcgctgcccatggatccttcagaactgtacaaggtcccagacagaattggaaatcacctgctttttttcataacctaactgttacatattatctcaccatcctaagcctgagttacagactcagaaaaggacgcctgtttgtcagccctttaaaaaggaggaagtgtatcagagggaggaggagttctggttaaatggaactatccaagtgaaagagcagtccccaactgggtagtgttccagggattagtgggttgggagaacacagaggggggtcaaaaaaaggagaaatagaatgaacagtgaaagaaagtgatctgaagctacaagtttgggagggagacgtagtggaaaaattctgaaaatcagatgggtaactaactataggatgaaattggaaacagaggcaatggaatttctcaagcagggggcaagagataagattacttctggtggggtgcaggctggaaacagaatcataaataccagcaatcaagaattccttgatctgtcaaaagaaaggataatgtcagtaagaaataactgaagagaatgacaagaattaatcctggataaaagaagtaaagggtgactgtgagggaaagacctaaagatatcttaccttaaaaataaacttttataatgcatatatataaagcataaaaggattgcagtaaatcaaaactagatgacaaaatatttgaggtatactctgctggttttgagtaattatttagaagaacaaaggataaaatatttattcacatgtaagactgaacagcaaaatatcccaaaatgaacattaaagaggtagggagaaaaccagttagactgctcactattccaaattgtggtacaccaactaacattcaacagctatatttctccagcctttttctagataagtggttagcaaagtacaaaccccaggccaaatccagcccactgcctatttttacaaataagttattattggagacagccatcctcaattgtttatgtattacctatggctactttcatgctacaactgcagagttgagtaattgtgacagaaactatatggctcgcaaagcctaaaaatatagccctttgaatgcagaaagtttctcaacctctgttctaaataatgagagaattccccatatgtttttatcatctgacaactcattcattcttcaagtgagaataaagatacaaatgtaattctcaccttgtacacagatagatatagagttaaatctgatagatgtcaccctgtgagcaatggtcccctcaatcctcagtcaagtttcctcctaacccagtgcaatgcagtagatgatcagaggctctgaacagtgaagacccaagttcaaatcctacttctaccacctcttagttgagctttaatttcttctccataaatcttggattatacctctttttctacacagtacttttaaaagaatttagtgagacagcatacatgaaagcgctttgtaaatagtaaagtaatatggacagataaagcattattagcacatagatgtttatggagatgaactagtttagatttagtttttccctatcattttgatccaggttttcttttctttacttttctttttttgacgcaggatctagctctgttgcccaggctggagtacagtggcatgatcacagcttactgcagccccaagcaatcatcccgccttagcctcccaagcagctggaactacaggcaggcacccctatgccctgctaatttttttgatttttagtagagatgaggtctcactatgttgcccaggtgggtctcaaacttctagcctcaagcaatcctcccacctcggcctcccaaagtgcagggattacagggatgagcgaccatgccaggcctattgatttaggttttctaacataaaacatgatctgctcttttcaacaactttgtattgttgaaattcattctaattcaatatatacttacctctggcctgctatatgcaatacactcactggtcattctactttttaaatgaagaaaaataatagcaaatgaacttgtttaagttacaaatttttaagcaaggtatacatgtaataattcaaaggggtggttaaattaaaagtgcatttgaaacccggctctatatcgccaattctattttcacttccaacactcattctagctgaagagttggttatattctctaaatttaaccatcaagttggccagcctttgtttttaaaactaaaaggaaagctctttacaaagaaatgcttaaaatgaacatacacaataaataattttgacatgaaaagaaccttaaaatttatactgtaatgtgtccttatactttccaaagtgtttcacatccaacattttattagatcctcagcacaaccctatttggtatgtaagtactgttattcccttctacagaggaagacgggatggggaaagaaaagcaccttgcctaagatcacacagttggtaagtgaagcagcagttctggaccaaaacctcactttcagaatctaatttgatgttctttccactctactgtgctgcatggggtcactcttcacactgagggtagcacctacaatgctttcgcagctgactagatcatggtgctatgataatgactgccatttattaagcatcaaccatgtattacatagatggaagttacacatatatcacaaagattaaatacattatacatgcaaagtacacagcccaggatttggcacatagtaattattccattaacagcaactttaggtattatttctaattcgtacaactctataatcaatgaattctatctccatttttcaaatgaggaaactgaggctcagaaaagctaggtaacatgtccaagcccacataatcagaaagtagcagaacccaggattccagctcaagtttgacaaactctggagcccctttgtcactgggactttctctgaggcagaaagtcagagtatgcacattaaaaaaaaagtgtgttattaaaaaatgatgacaggacattttcctattaccttgataggccaagcaggcaaaggctgtaaaaagttagaggcataaggatagtccaccattgccagattcacccaggtttcagagatccagtctttcaaatgttggatgtcctgagaagttaatgggctgcataagtgaagggctccagtaagccactgcaaaccactgcctgggaatagaatcacactgttggaatctaaaaagtactggtcaacagatgtctttacagatcatttattcttcacatagtattttagaaaactcaatcttttataccccttctcccaggatattttcagagcaactggagaatcccatgacagacaagttgcctatcctcatagagtttaccataattagtattcagaattattctccctttttaatatactattaaaatgaataaataggaacactatagaacaacaagaatacataaactacaacttagtaaaacaaatggatgtatctatcaaacagtgctaagcaaaagacagtagacacaaaaaagacatgctatgtaattccaattactaaaacatttaagaacaagtaaaaattaatctatggttctagaagtgaggatgtttttgctgggtaggtatagaggtagtgactgaaaaggcacgaggagatttctgagatgctgacaacgccctttactgatttaaatgctaattatactgtgtccttgctttgtgaaaattcatcaagctacgcattttgatttgattttgatttgtataattttctgtatgtacattatactttaacaaaatgtttacttaaaaagcgacaactactgaatttaacaaatgaaaggttaaaaaaacacacaattccattctcttaattaaagcttaccagtatttgagagtcgattaatggcatcccaggacctgtggatgctctctgaacaatgtggaccgcttttcctaaaatctgtagttacgatcttcataaatacaccacaaggtactaaatcctcaaactgccagataggggcagaagctgcaagagctctaaatggcaagaaaatcaaagaaagaaaaaagaaaagaaaaaatatatatatatattatatatatgtcatctaaatcaagttttaaagttgaaacataataaaaatattgagaaaaataacacagctgttaatgagacagaagccagaaacctcagggtaatggcatggaacatgttttacccaaaatgaatctctaagtttcccttgataatcattaagaaacgttcatgtccagtacaaatgcacttacccaactaccatatgaggatatttcatcctaaaccaggcggcaagcatgccaccataggagcctcctatggcaatgacaggttgattttcagctcctgggattgttcttttcaagtgtttgattaactctgcaaaatcagccagagcttgttctgatgtcaggaaattcaagtgtctggaatcctaaagaaatataacaaagaacacgggtataaatgtgcacataacagcagcttaggaatagcatggatccagaagagagccagtgtcagataagcttttctctaaatagaatttctaggcaattgagctaaaatgcctagtcaaagcaataactgtgtggattcaaactcatgaaaatgattttaagtttgtggaagaacataatgtattttgtatgcaagtagattgtagaaacaacagaaacaaattgtaggtaaaatttaatagcaaatgtgatcgaatataaactaagcttaatagataactgttataacttttgttttaaatcttggcacatttaaaatgtctgccacacaggcaaatataaactaaatctagtggacaattgaggtaagaatcaccagtaaaaataaaactcacccttcttcatcggaaagattatatatgacctcggccatatcaacaactgaaacaaagtagcctgcctattttaaacaattataaaattggaaagaaaaaaaaactattttcaggtattggaaaacaggcaacatgagacattgatctttgagaaaaggaaaactcataatgttaagtttcataaacatcctgctctctacatgaagacaatttccctactgcagaaggtgaagcccagtgtcctgctgagctgagaaggctaagaaggtcttttaaaatatgtctgcaaattcttgacactcattcctttaaaaggtgaagcttaattccactccctttgaacttggatgggatttaatgacttggttctaatgaatagaatggggcagaaataatgatatgtgactaccaaggttaggtcattaaaaaaacactgcagcttccaccttgctctcccgcactgccaactttgagggaaattagctgccttgtaatgaactcaagtagacccttaactgcagcctcttgtcaacatccagcaccagttttatctcgtatgtgagtaatcctccatatgagaggctctccagccccagtcaagacttcagatgcctgcagcaccagctgacatcctaacctcatgagaccccctgaaacagaaccacctagctaaaccactcctaattcttcacccatggaaactataaagtaatagatgtttattgctgttttaagccataaggtttgaagtacatctttactagacaacgaatacagctacatacctctattaggctaccctgtttgactttcatgctttggtctcaccatcctgatttcttccatcatctggcatattactgaatcacatagatcccatctttcctatctcctatatatgccacctactcctttagctttcccccctcttccaagatgtatgccttcttacctcctctctccctgtctgtcactatcctttacttccagtttttatggcactctgtacagttgagtgcattttttttctaatccttgcataatatctataatatccttcatgctactgacatattctgtgagcacacaaagggaaagaagtatatcaaaaagagcccctggctccattttgctaacacagtatcatttatagaaacctaggagaggaagttatgttctatctacaacaagctaactgcttcccagtggtttcaggacttgtcaagtcccttaatcagatatttacgcaaaataccaagctaaagaatagaatttcccatacagctcaacaaatatcagcaaatcatcccactttatatttataacacaacatttttacttatttttactattgtatttatttataatatgagatagtaaaatatcctttttaaaaataaaaactcctttcaaaataggcagcctagtaaaggactggccccaagtccttctagctgagagttcccaaaagcatatgtatacactgatggtattaggaagcacacaaacatttttaatggaacatttattgcttcattttagtgtaatttgtaaagaataaccagtacacagagcccttggttaagataatgctaagtttaaaaagtgagctgattaaagaaaaatattaggtaaataatagtacacgtggcaaattaatatagccaaagtcacaagtgtagtagtacatgaatgactcagttgaagaaaaagtgtcctggtttattaggtagagtctgtgacaaaggccaaagctcctgtgagaacaggaaaggctgaaagggaatccaaggggccagttggccttaatgcatcatacagcttatttgtccttattttattgattttattttattaaaaacatcttatcagataaatttgttatgctcattatattttttccagtggcaggctcaataatttaagtgtacgatttataaagcggaattgtttactgatatttttgaaataataaaaagctccctgtgctgtctctgcagccacagagtaaaatttaactttctgaggcacacagagttaaaaactgattaacattaagaattataataaaatggcttaaaaaaaaccctcagtctgttcaaattgtatctaaaaagaaactattaaatataaactattgagcttttaggcatttcaaatttaagttatctcacagtggggcatataatttagaaactattctaaattgaaaagaaaaagcttgtaacttttaagtaaaaagtatctttaccttgaatgagttgtcaccaaaggggagagactctccatagtatcgatgttcagcaaacaccaacatagctttcagttcctcagccacatcccacatgaacccctaagaagagtttacaaaatcacaggataaaatcagaatgtgaaaaaaagtcactgaaccttttggcaaaccatatggaatagatgttaagccagaacaaaaagagcactctacaaagttgcacaatttgtgtttgttccacaaataaatgacataattgatgtcttattgttgcatatcaatctcacactttatgagtgaaacaattaaaaataatcccaggttgctcatccactagtcatccacgtctttttatcctgacactctagccctagcatcaacattatgtctaaaatggtcttcatgtacaaagagccagtacaaatcctactgaaattatttttaaataaggacgagggcctcttccctaactcattctatgaagctagcatcattatgatacaacacctggcagggacacaatgaaacaagaaaacttcgggccaatatccctgacgaaaatagatgcaaaaacccttaacaaagctagcaaaccaaaatccagcagcatcaagaagttaatttaccagaatcatataggctttattcctggatgcaaggatggttcaacatacacaaatcaataaacagaattcaccacataaacagaactaaaaaataaaaccacatgatcatctcaatagatgcagaaaatgtattcgacaaaattcaacatcccttcatggtaaaaattctcaaaaaagtaggtattgaaggaacataccgcaacataataaaagccatctatgacaaacccatagccaacatcgtactgaatgggcaaaagctgtaagcattccccttgagaactaagacaaggcaagcatgctctgtctcagcactcttatccaacacggcactggaagttatagccagtgcaatcaggcaagagaaagaaataaaaggcatccaaacaggaagagaggatgtcaaactgtctcttttcacaaatgatatgatgctatacctagaaaccccacagactccaccaaaagacttctagaagtgacaaaacaacttcagtaaagtttcattatcaaatttaatgtataaaaatcagtagcatgtctatataccaataacaatcaagctaacagccaaatcaaaaacacaatcccatttacaatagccacaaaaagaatgaaatatccaggaatacagctaaccaaggaagtgaatcatctctacaatgagaattacaaaccactgctgaaaggcatcagaaacaacacaaagaaatggaaagacattccatgttcatacataggaagaatcaatattgttaaaatggccatactccccaaagcaatttacagattcaatactattgctatcaaattaccaacatcatttttcacagagttaggaaaaaaaaactattttgaaatccatataaaacaacaacaaacaaacaaacaaaaaacttgaatcaccaaagcaatcctaagcaagaaaaacaaagccagaggcatcacactacctgacttcaaactatactgcaaggctacaataaccaaaacatcaggtactggtacaaaaataggcatgcagaccaatgtaacaggatagagaatccaaaaatcaagccacatgcttgcaacaacctgatcttaaataaagtcaacaataacaagcaatgggaaaaggactccgtattcaataaatggtgctgggataactggctagccatatgcagaagattgaaactggaccccttcctttcaccatatacaaaaatcaactcaaaatggataaaagacttaaatgtaaaactgaaaactataaaaagcccaaaaaccccagaagaaaactgaggaaataccattctggacatcagccttggcaaagaatttatgactaagtcccaaaaagcaattgcaacaaaaacaaaagctgacaagtgggacctaattaaactaaagagcttctgcacagcaaaagaaactatcaacagagtaaacagaccacctacagaatgagagaaaatatttgcaaactatgcatctgacaaaggtctaatatctagaatctataaggaacttaaatttacaagaaaagggccgggcatggtggctcacgcctgtaatcccagcactttgggaggctgaggtgggcggatcacaaggtcaggagatcgagaccatcctggctaacacggtgaaaccccgtctctactaaaaatgcaaaaaacttagccgggcgtggtggcgggcacctgtagtcccagctactcgggagactgaggcagtagaatggcgtgaacccgggaggcggagcttgcagcgagcccagatcacgccactgcactcgagcctgggcaacagagcgagactctgttcaaaaaataataacaataaaataaataagtaaataaatttacaagaaaaaacaaccccattaaaaagtgggcaaaagacatgaacagatacttttcaaaagaagacatacacaaggccaacaaacatgaacaaaggctcaacatcattatcatcagagaaatgcaaatgaaaaccacaatgagataccatctcataccagttaggatggctattattaaaaaacagtaaaaaaataacagatgttggtgaggttgtggagaaaggggaatgcttataaactgttagtacgatataaattagttcagccactacggaaagcagtttggagatttcccaaagaacttgaaatagaactaccattcaacccaccaatcctcactactgggtatatacctaaagaaaaataggccaggtgtggcggctcatgcctgtaatcccagcactttgggcggccaagacaggttgattacttgagtccaggagtttgagaccagcctgggcaacatagtgaaacccttttctctacaaaaaataaaattaaaaactaaataaaaatttaaaataaaaataaaccattctaccaaaaagacacatgcacttgtatgttcatcttagcactgtttgcaatatcaaagacacagaatcaacctagatacccttcaagagtggactggataaagacaatgtggtctatatacaccatagaatactacgtagccattaaaaagaacaaaataatatcctttgcagtaacatggatgtagctggaggccattatcctaagtgacctaatagagcaacaggaaaccaaacactgcatgttctcacttataagcaggagctaaacactgaatacacatggacacaaagaggggaacaatagacactgcatgactactagaggggctaatagtgcagggagtgtgggtgtggggcatgagttcaacaactacgtatcaggtactatgcttactacctaggtgatgggatcattcatacaccaaatctgagcaacacacaatttacccaagttaacaaacctgcacatgtaccccctgaacctaaaataaaagtcaagaaaaaaaaacacgatggagagaaaacaaattaaataaaaataaaaggtaatttcaactttaaaaaaaaatgggccaggcgcagtcgctcacgcctgtaatcccaacactttgggaggccgaggcgggcggatcacgaggtcaggagatcgagatcacggtgaaaccctgtctctactaaaaatacaaaaaattagccgggcgtggtggcaggcgcctgtagtcccagctactcgggaggctgaggcaggaaaatggcgtgaacctgggaggcgaagcttgcagtagccgagatagcgccactgcactccagcctgggcgacagagcgagcctctgtctcaaaaaaaaaaaaaaaaaagtctacaaattgcactgtttgccaaatcttctaggaaagagctaaagatatctaaagaagctgtctactcataggcattgacaacataaaagagaaagcaaaacaaacaagcatactaaactccctagggggtttcaattaatcttctttattggaaaataaatagtagcacacaatggctaataataactgagtgtttataatgtgtcaggcactgttctaagcatttcatatgaattaattcacttaattatcacagcaatctatgaaataggcactttgattacccccattttatagacaagaacattgaggcacaagagtttaaataactttcaacattcacacagctagtaagcggcattgccaagattcaaacaggtgtctggctccagagcaccatcatcaagagctgttagatctccttgctagaaccatctatatctggtcattagccaatcacttcattttttcgcttactcagttgtggcctcagaatctgttctcaacgaagcattctaggtagtcaacatcaatcgattagatttagatttagcacagattaaaactacttgtcattcctagtgcacattgttgctttttagtgagttcctgctccctaacaaagactaagaacctcaagtgtttttgttttgatcgataaatgaacaattagaagagttatatgcatgtaaggatagagaatttaaccagatatttgtgatggtttcaataacccccactttctctcttaaggatctactcattccctgccatttatctacagatcttgcaaacacccagctcaagcatgcccacctctgcctgccccaccttggcagtgctgatcactcccccttctcaacaccactgtgctaggtataggtccctggtactgtgccgcaaaatttgcttacatgtatgtcacacaccagaccgtgagtatcttaagagtaaagatcatccattacaatgtccagacctctgtgcagttgatttcaggctttgagaggaggcaatttcattgaactagttcacaaagtaataagtgatgtatttcaggagtattcttatttttcaaaagaggtcaatgtaatatatcaacatcttttaacattatgtgcttgcaagtcccctaatcttctttaattctttacacaactctatgaaccattattactgtatccatttaacagatgagaaaactgaggcacagaacaagaaacttacctaaagtcacacagcaaagtggcaaaatcagcattcaaaccttgtctatctgactgaagccttcactctcgaccactgtgtgatgctgcctctcaacaaattaatgtccagcagtgaatgtgcactggaacattttggtatgtaaaggaaggtctctggggctgcggatgggccaggatctgctcttctatgatctgcctctagtcagttcttcagaactgttcctacactgaatatctcttcctttccaccactttcgagaacagagataccccagcaaaccttaagttctgccacagtgcctgtcagagtagtgcctagtggaggcaggaacagctacctgcctataatacaagagaatggaaactggaaaaatcactggacagggtaagttaccctgtggccttcacataaaatgaaagtcacaccaaaaggagaaaagagacaaggcagcctctgtggtttcacagaataacagaacgggaatctgatggaaaggagatttctcttgtctcctttccagaaatcagagaaagaatctgatttctcttgtcactgacctaaaagaaataggcatcctaggatctcatttctctgggaagtattttatttcaactaaattacttagattcttaacattcctaaggaaataatcagaaatgagaaatgcaataacaatgtaattgggttcatatctttactttaaattcatataccagttaaacaaacatttactgagacctcctgactaccaggcattgtgccagacactggcattagggataatacataattcattccccactttaaggtagttcacaactagctttttggtagaaagttgacatttcctagtcacagcactgacacattgaaaaggagcatttcttcctttcacatatctttccaaattaagttttgttaatggatttcggcattataaaaggtgatagaaaatatagtcagggaagcaagctaacaggctatatactacttttaaccctcacaaataaaagaaaatggtagaacaggaaagctaaactaaaatgtaactacaactttaccttttcccattcctatttgtatatttttttctcatttgcactggctttgtttaggttttattcattcattcatttaacagacatatatcaccttctatatgtcctggacactgacaatataacactaaacatacaaaaattcccacccttgtttttaccttctagagaccataatcaaaataaactatacacagtaacattcttatccgtttcccttatatgcttgttcactctagaaacaagctgagattttataaacaaaacaaagcaaaacaaaaacaaaaaacttgcaaaattcaattctctgggatgttcaggcagtccatgaaaaatacaataaaataaaataattcaattctccaaaaattgtacattattcttttcatttgtaattctttaaagctgaatatgcagacttattggatatctgtatttaattcttttatgaacttcctattcatgtgcttttgctatttttctattattagtgtgttaatttttttgttattttttacagaactttacaattaagaacagcaatgtttggtcatacatattgcaaaacatttcttccaagttatcataataaaagtcaaattgagcactggaatttcatgaatctgcacataccgtgttattacaaaaccagataatgtccccttcattaccagtgtagaaaagtattgatccaccatttttcttccagtatttatcagctactaggtaccgctgattaaaagttttcacagtattaaatccaaaatgatcaacctgtgataaaaacaaaacaaaacatatttcaaaggaaagtaataaaatgagatcaacataaaggtaattaattcttccattaaaatcaatctctactacaaaaataatcacaagaaattttaaacttcactgttttattattaatagtaatatcgatattattattttgaaatcatttccttatattataaaataaagtaatatttgctattggtgatcaagattttcaatgtaaaagaaaaaatacaattataaaatcaaatagctacttaaaaacataatgttaaaattgaattgtaaatacaatgtgaacccttttttaatttttaatgcatttttaattggcaaataaaattttacgtatggtgtatataacatgatgttctgaaatacgtatatgctgtagaatggctaaattgagctaattaacataagcattacctcatatatttatcattttttgtgataagaccacttaaaatctactcccttagcaatttttaagtatataatacatcccattatttttcaaaatacagttttccattactatctgaattttcattgtacaaactttcaatattaaaaattcatgaactaaatagactactgaaaaggtccataaaccttgtcaccccagcacaccatagatattctaagttacaagaatttcatgtctatatcattcccaccaaaagaaattagggcttattagtgaagtggctgattgacatttgggacaaggaagctgcaagataagcttatgcattttgctgtgcaaggaagcaagaaagtgctcacaattaatggagagttatatttaaagaagataggaaccaaccacaaggaactatcactggcaatcattttaataaattgaacgtaaaacaaaaacaaattaaacataaaaagaataatgactgtagttaattgaaacattcaattcatgaaactccattagtccacaaaaatatttctaaaaaggaaagaaaggaaaaggttcatttgccaccatttgtttattaaatcaactcttactctgaaattgggaattaaaaagtaaaaaattcaacatttaacctgcctgtccaacagaactgtgtttgatggctacgaatagtcccagttaataaagaagagctgtgtttagtcaaatgtcagctaatgtggaaggaatgacagaattagaatatgacagttctgtaaagttactgattcaggcaagaattatcaattggtgttaaaagcattaggaaaatgaataatatgaaaatgaacattcatatagtatcaaagtaatacaatagagaatactcgcttgtcacaaggggaaaacataactacaatggaaggatcaggctgctatcactttaatctagtaattaattttgttagtatcatcaatggtagagcacgcagggattatgtatctcctcatgtggcacaacatgaagcacatatcacctatgacgtattcctgccgaaaatgtttcatttcatcttaatccagcctttagatctaatttccaggttccaggaaatataaaggtaaaagagcaagttgaagatatttcaaagggacaacagatactgaaggtagaacattttacaagacaattgacaaggcaatatcatgagaaaggactattttagattaaatgaattttaaggaacataataaccagacataatacatgaccctggattggatcctagtttgaacaaacaagatatacacaatgatgtagggacaaatgtgtaattttaatatggactagttattaaatgatacaggttgagcatccctaatccaaaaatccaaaatccaaatgctccaaatctgaaacttttgagcaccaacatgatactcaagggaaaggctcattagagtatttcaaattttggattttcagattaggtatattcagtcagtaaccataatatgactattacaaaatcaaaaaaaaaaatccaaaaaaaaatccaaaatctgaaatgcttctggtcctaagcatttcagaaaaggaatactcaatttgacctaaagacttgttcattttgtcaaaagtgttcatattgttttggctacataagaaaatgatttcttaaacggaattttaaatatatttttgagatttctttttaccctttgagattttttaacttactatttaaaatgtaattatcaaatactataacatggtaagattcatgtacaacaatctgaatttacagatttaccctgcagcacagagtctcactgagcctttagcatcatgggggctaaattcctcagtgctttggaaagacagaaatgagaatgcagcacccagtctgggtcagacataggctgttccagcgctgctccagtctcccaggaacagtgcttagttttgacctaaaccagaccctgtaagacttgcctaggtcattctaaaacagatgggacttcctgcacccagctctatctacacacacagttcccattcataccactggtcccaaaacacaagtgtctcaaaactttacctaactgcaaacttcctggtatctatgatcatcaccatatgtagtcctaaaatatgatattctaatctaaagactgtctacttttcaggaaaataagcagtttttatggacgaggtatgtaataatgatgtccatgtgctataaacccttccattatacatgttaatttactcaatcattcactcaacaagaatctattgaattcctattttgggccaagtactaagctaagcaatgggataaagagttggctgagctgcaatccctgaatttaacttaagctaattcaactatatccactcagcctaaaaatgaaagggcaagaaaggcagacagacagtgaaaggaagacggataagtgattccacctgcttccattcaattagtacagtggttctccaggtgaggtccccagaccagcagtatcagcttcacctgagaacttgctgaaaatgcaatccccttggctgaatcccagacctacagaatcagaaaccatgagggtaaaacccagtaaactgtgctttaacaagccgtacaggtgattctgtaaagttttgaaaaccactgagttagaataagcaccaaaatagacattaatttgttattccttctcttgttctaggtttcagagtacctgaaatactgtaagtatctcatcatgctgaatgagactctggtgtctaaagatttgaattaccactgaacatacccccaaatataagctaactgtatcatttgaaactcaacatgagaaaccaccacaggaacacctttcgaaactcagcaggtttcaacaagggaggaaagactgactgtgttggacttaaagaaaggaagctcatggctctctaacaagatgccttcccatgagattcttgaagataattttgccctaatgattttcacctcacccactgactacagaactgagtcttcatgtaaactgagatattgccgtagcctttaaaagcatcccacaaagaaaaacattaataatccagtctaaaattttcagatttgaaaacatgggtatgtgtttgtatatgtcatgctaaatataactgatataaagttcttgccagagaaacacttccatctagaatcacaagggccacaagaacttcagaaccagagaaagccaaattcccttgtgtggccatgcccaaggtactcctgctcccagcaatcagccttgattgttaagattggggaaaagagagaggaaccctggcaagaaagcagacttcggagttaaaagacctgaacttgaatctcttctaactgtgaagcctcgggcaaattacttaacctctctgaaccttagtatcttcctgtataaaataaggataaccacatacaattcaaaggatttctgtgaggatagggaaaatgcacctaatgtaccaggcatagttccagatatatacgtgcttaaaagatgttagttctcctctctatcccatttgcacaccaatcctaagcacggagtacttagatgggagacagattaagttcttcacagaattacaggaccttagaatgtcaaaatctcctattttctgagtgcttcacctaggtgctaaacaactggaaatacgtagtgaaatgttctttgcacaacatgaatttacagaatttccttggctccttcctatcatcaaggatatcaacttctggctagataactagatagttttcaacacctaatggccaggcacactaggggcagcatgccctctgctgttgagaagtgggacccacgtgccactccctgttctgggctcctgaataaagattttatgaattacaacacggaaaggtcacaagggccttagaaaccattccgtctgtgttgctcaactgaagaaattaggctcgaagaggtcacatgacttagccatggtcacaaggcagaggcagagctagaactttatttttgcagtttggtttattgaaccaattaaaataaataatagcatggtaaagacaacaccgtatgaccttggaaaggaaacaaacctctctagtcatgcacagcagttctttctagcacgtggtcctagaaatttcattttttcttttttataattttttttatggcccaagaaatttcaaaacatgcttccccactttaccatgtggaggagaaatagatctgtgagaatgggtaggcaagaagaaaagagaccatcctttaaatgatgtttattgtataaaagtaattatttggactttaaaaccactcaagaataaagttcgcatccagaaaaatcagtagcaacattacatctgttagttttgatggcaacttggggacagcgggggtgggagaggtggggatgggagggaataacacagagcacctaccacgtgtctgccacagtgctgttgctctacacagatcccttcaccatctcggcagttaccctctggggccactttcatcacccagttttaaaataagaaggctgatgctcagagaggtcagagagcttgcccaaggtaatgtaactaataattaggaatcaaatgtaattcttttcatgtgcttttaacccctacccaatcccgcctccaagaaaacccagatctttatactccttgcattataacacgctcatgcagataaagctgactataaacttcaaccctcggtaggcgacacttaagagtgagtatctttctcctaaatttgcaaaatgaaggacaaatctcccagccatttactaacagttacattgcagaatatgtggaatgttggtcttttcactgacctgacaataattgttactacactactattgctaactccattaggccactgataaaaccaaaatcacattggctccttcttggcagccttcggttttagaaaattcagtatgcagttggatttattcaggcacccagacatctaataacagttaactaaaattttactaaagatacaaaaagtatacccagagatatacatgaccaaaaaaattaacttacgcctccaataaatcaaagcaccttaaaggagtttttcatgtgctctggtttccaactctaatgcagagatctaaaataaaataagaccctctttctcccatttgatgtgtgtgtcttatattaatttggggattgtggggttacattccattagagttcttaaatggagactgacagctttctgggcaagcttgatatgccctgaaaggatggacacttttatgttagaagaacacgggttcccaaagaaggactaaaacatggaaggaaggtggagtttagacaagccctagatctacagttggagaaggatggatgtctaggagtggattcctactaagttgtccctcacacatgggcaccctagaggtaggacaagatcagagagcaagccacatcttatgagtcagatctctggctcttggatgactcctggtttatttcttctttattatgtcaaggcctttcaaaaaccctgcttaaatgttctacctttactcatccatacaatgaagataccagaaagtattggagattaaatttgacttaaagaattaaagaggaaacggtatcccccagtgagtgtagtggtagcaaaggaaatgtttacaagtccctccaagaggaaggtgagtccaagaagatactgtcctcccttcccacgaagatgctctcgtcattgccaaccttagagggtcgagcttccatcttaacaaaaagggtggaagtcctctcagagatatgcttcaaaggcaatcatcttcgtatgtaataagacactgctcctctttacacatacttctataagtgttaaccaggagacagaactgcattccctgactcctatgctttttttttcctaacatgcccctaatcttaaaaatgagactcttagaaataaatttatttaaagagaaaatggtaaatgagaaagggaagcaaataagtgataatgggagagtccatcatggggaaaatttagtgccccagcctcctatactcagatggtttgaaaggcaagaacacaatagctaccacagtgcccttgtacatggcagatactttatagataattgtttttaatttttttttttttgagccggagtcttgctctgtcacccaggctggagtgcaggggcgtgatctcggctcactgcaacctccacctcccgagttcaagcaattctcctgcctcagcctcccaagtggctgggattacaggtgcccaccaccacacccggataatttttgtatttttagtagagacagggtttcaccatgttggccaggctggtctcaaactcctgacctcaagtgatccacctgcctcagcctcccaaagtgctgggattacaggcatgagccaccgcgcccggccatagataattgctcaactgatgcagtttaaatcttctaagtaagtggttcttgtgtttctgattatgaggttcccttcttaatgttaaaattatcacagatgtgttatatattagtagccagtgcttgagaaaatatgagaagctattataaattcaataatggtataaataaatatcacaacagcatctatctatgtggaaaaaaaaattgtgcttagtaaccaaatggggagagaaaacaccctctcgaaaaattctgcagtgcttaataacctttctttcctcaaaccaagaactcctgggcccagagggggaattgctaagttatcaaaatgctgtgaaaccaaaacactctttgctttactgctaaaacagaggtgaaaatatcctgccgttgagaatacctaaaatgctccagtaaatcaagaaataacatgttttgacaaataacagttaagtgtttcattagagggagattctatctgttggtcaaacagctctgtgaaagcaccacataatcaatgccttcccacggcttcaggaagctttgtactagaagaattaccgggccacagctcaagctcccaaattagagataaagtgctgctgtaatcaagcactgcatataaattttaggaaatgacacaccaccagagggcgcccttatataagtagtaaagtcggaaagaccattactttttttttgtttgttctctaagagacggggtctcccctctgtagcccaggcaaagtagagtggccagatcatagctcactgcagcctcgaactcctgggctcaggcgatcctccttcctaagctcgagagtagctgtaactaaaggcgcacaccaccacacccggtttgttaagttttaaattaagtttcagaaaatcttaggacagaaagggaacttagatctcaagtccaaactcttggataaaaaacagacacagaggccaattattttaaatctttcttttctaaataaatatattatatgttcacatgattgaaacaacaatcatcccccttctttttaaagtcaggattcaaaatctgtgctgtcagaaaccaggatattggttaccagtgcaggggaaaactgactgtaaaagagaatgaggggattctggagttaggataatgcattgttctgtatgtataataagataattcaaaagcagattgataaacatttaaaatctcattgaagatatatattattttacaagatacatgtttatatttctatttcactatacaggcatatgtaaattatattgcactaaatcacattaatattaaatttttctttcatttaaaaatacttattgagtgctcactaaaaggcaggtattaagaaaaaaactaagatacaattccatttctcaagttctggagaatctaacagaaatgattaatgtgctagtaaacaaccaagcagtggtgtggttaagttctgtatacaaagcactgtgggagctcagaagccaaagtcaccaccctgcctgaggaaattacagagggctgcaccaaggaggtaatatctgagctgaaacacagagaagaatttttttttttcaggtacaaaagagcatttcaagcaaaggaagaaaaacatgtgcaaggctatgatgagctatacagaatgagcataaattcaggaactgttgttttacggcaagaggtttatgaggggaagacatgggagatgagattagactcactgggctgccacaatggctcacacctttaatcccagcgctttgggaggctgaggcgggaggatcaaattgaggccaggagttcgagaccagcctgcccaacatggcaaaacctcttctctacaaaaatacaaaaaattagccaggcatggtgatacacgcctataatctcagctacttgggaggctgaggcccgagaatcacttgaacctgggaggcagaggttgcggtaagccaagatcacaccactgcattcccacctgggtgacagagcaagactctgtctcaaaaaataaataaataaataaggaaaaagaaaaacctaggccaggtgcactggctcacacctgtaattccaacacttcaggaggccaaggtggtaggatcacttgagcccaggagttcaagaccagcctgggcaacatagcaagaccctgtctctacaaaaaataaaaatattagccgggtgtggtggtacatgcctatagtcctagctactcaggacgctgagatcagaggatcccttgagcccagaagttcaaggttacagtgaactatgatcatgccactgcactccagcctgggcgacagagtgagactccatctcaaaaaaaaaaaaaaagaagaagaaaagaagaaaagaaagaaggaagaaaggaaggaaggaaagaaagaaagcggtatagagagacagaagaaagagaaggaagggaagggaaaggaggaaggaaagaaggaagagagggagaaagggaggaaagaaacctagctgaaatccaagattgtttctctaaaccaacagtgaatgaaaaacatccactggaaatagactcaaataggcagggacttttttctgttttgtccacttctgagtacacagtgactggaataaggcctggcatgtagtagaagaccaatgaatatatagagagtaaatgaatgcatgcatgcatcatggctctgcagttggtataaaaacaaaaatgagaatggaaagcaaagttcccaagaaggtcaagtttgtgcaggttcatttattgggtgggtctgttcccagctttggaagagttgcacaacactgtagttggatgtgccttttgcccagtgacaaatcacatgcctaatggagaacccaagccttaaatctaagagcaccacataacatttggactgctgaggaagcaggaaatgcatgccttctgctgggtgaagaaacagttctatataactacaaataatatggacagaaggccaacattgcagggagtgcaggagaaggactaatcagcattttaccaaagcatattacctaaaatataattgatcttggtgacaaggttataagtcaaagtttttaagactggaaaggactttaaagtcatggctgtcagccaggacacaataactttacctgagaaacagctttctgtaaaatgtacaacatagcagctcgttcagcagcatactagtgtttggtgaatccacatgtgctgcaaaatgttgatttgatcaatgtgtaaaatttgtgtttccaacaacagagttttaagaaggaagaaacagggaagaggtataataccctaggacaaaaagtaattggagggaatagttgagactctaggtaagtgagggatatgtgatgctgcgagatcctgggaaggaaggagggaatggggtcaatagcaccaacagaaggatctgacttgggaaccccttctccactgggaaacagatggatgcaagagttatctttctaattaccgagggaggaaactaaaaggattctagttaaaatgcctctcatataacaccttagtttttagtcaatgaagtaaagggacaaagtaatctattaaaagagatagtaaaagagagcctaggatggcaatgatttaaagacagaggtaaaagttcagcatggaagaaaaaactgatgcctaggcctccataaagctcctgaggttggagactgaattggtatgcacaataatctgccgcttagcagatatttacaacccaggagcaggagcagagaagtttaatggttggataaaactaggatgagaatgtcataaaggggttgtgagaggacagggggcaagagaattaaggtcattcctatcttcatgcagcctgaatatgcccagagctatgaggtcctgtccaccacagacaaatgctgccataatctgtttgctgatttgcaaggtaatctaaactatgctgtatttattctattttaaggagtaaataatcttgccagaactcatatatatgatatataagcatttcaataataatctcataaaaataatgtaaggctgcatatcatcaaggccttgaaagtttatattcttctgctttgttaaacataagatgatgtgttactgattttcttcctttatagtctattgttctaaatgtttctctttttttttttttttttttttgaaacagaatctgactctgtcgcccaggctggagtgcagtggcatgatcttggctcgtgcaaacttcgtctcctgggttcaagcaattctcctgcctcagcctctgagtagctgcgactatgggcgtgccccaccattccctgctactttttgtatttttagtagagacggggttttgccatgttgcccaggctggtctcgaactcctgaactcaagtgatccacccgccttgccctcccaaagtgctgggattataggcataagccattgcacctggactgttctgaatgtttcttctatacatgcaaaatattctcctgacaccactgttataactacatcacatcttctgagagatagaggctggtatctgctggtataatgtaaaaggacaaagacccctcaacctccaaaaaaggcaaaaaccacgtttctcacgaacaggagttcagacctgtgatctatgtaactcacaatccaatcttgcatactaccactcctcctgcaaagaactgtgatgacctcataaatcttctgttctccaactgagcaaccccagttcttactatttcccatataacactatattctaaagtcctcctaaccctgctcacactggattaattaacattccctcttacagatggtgtgcccagagctgagtacaatatgtaacgtggtctaataaagtgccttgctcatcactggccaggaataaataaccgatgagtgtgcttatagaccttatccatggttttgctttctgcagtttcagttacccatggtcaaccatggtcagaaaataggtgagtacagtacaacaagatattttgagagagagaaagagactacgcgttcacataatgtgtcatagttgtttattattcattattgttgttaatctcttattgtgcctaatttataaataaaactttatcacaggtatgtatgtataggaaaaaacatactatatatagggttcagtactaaccgacatctctggcatctactgggggtcttgaaacgtatcccccgcgaagaagggaggactactgtatagctccaataacacagcctactttaaattgaaagtcatgtaggtatactgggttgcatagcatccccccaaaatttatgtccttcctagaacctcagaatgtgactttatttagaaataggatcattgcagatgtcattagttaagatgagggcatgctggagaggggtgggcccttaatccaatatgactggtgttcttataagaaaagaagagacaaagaggcacagagagaagaatgccatgttaagacacagatgcacaaaagcaaaatggccatgtgacaatggaagcagagactggagtcaagcagcttccagcaaaagaacgccaaggactgccaacagccagcagaagcttagcgagggacacagaccagactcttccccggagcccggaccaggctctccccaggagtccccaagaagtaaccaatcctgctgacaccctgactttggacttctggcctcgggaagtgagaggataaacttctattgttttaagcctcctagtttgtgatactctgcagccctaagaaactaatacagaaggcctctctatggaggtggcaatggaaccgaagcctgaaggagccagacaaagaaagaactctagaaagaagaaacagaaaatacaaagagccagaggccagaaagagtttaatgtagaaagagagataagatcagtggtgaacaagagagagaatggtactggatgaggcttagcgctaagtgggctatgatagggagactgaacttaatttaaaggcaataggaagccttcaagagttttaaaacttattctgatctgtttttttttttttaaaaaaaaagaaagtaagaagaataagtagaaggctattgaaaggttcacatggcacatgattatgagaacaagccaggcttcaagccaaggtatgtctctcttaaattgctacatatttaacatatatgacaatgtttaatctccaaagtcataatacaccccagaaagatctcaatgaagaaggactcaatatatgacatcagcagtattcgtttaacaacaatcaacaaaaggaagtcttttgaacagctgtagtcaccactatagcccacttataacagattctgcagtggccctgactgtgggcattttaaacacgaaatgccccactaaattggcaaaagagttccaaggccatcaggctccccccagcatttaatagaagtcagtaaagcatattctattgctacccttttctccaaaacctattcaagaaattgatagaaggtaataaaactaattgttctcaaatgtttaggtcccgttccaccctggtgagataaaagacatcagcagccacaatcttcactggttacctctgatgaattaataaactacatgtttaaaaaagaaaaagtacatacaaacatagtattacaacataatgctaaaatacaactcttcttcttccatggagaatcttctgtgaatgataccatgagaaccactgaaacagaaaacctacaacctcttttcagagactgctttaaaataaatttttttatcacattgaaaaatacatgatgttaaagcactctggaaaattaaactttacaaaatccccacatgaatagcatccaccaaaggaagcagctgaggaaagtaatgtctaagttttttcctccctggaaactccaactcaaattcgcagtcctgatttcactataaaatgtcctccagggactttttatcattatcttaaagatacactctacagactattcattgttttgcacattcatccggtctaaatgataatggcgctgtaaaaaagataaaggaagggaaaaggatatcctcagcagaaaccaaaaagctcagaacaataacaacaagttcaaatgtaaccaagtggcttcctttgattactttcaggtggttttgccaccacgacaccagataatcaacaacttcccagagttagtgggatgtgtaagtatttcttgagtgcctaccatgggataagtactagagtataacaacagtgaacaagctagatatggtcactgcccgcacagggcttatagtctggtgacagacaacaggaaacaaaaaacaaacaagcaaatacacaaataagaacttagaaactaattgtacaagttttacctgggtgcggtggctcacacccgtgatcccaggactttgggaggccaaggctggcagatcacttgagccaaggagttcgagaccagcctgggcaacatggcaaaaccccgtctcttcaaaaaatacaaaaattagcatggcataatggcatgcacctgtagtaccagccactcaggaggatgaagtgggaggatcacctgagcccaggagttcaaggctgcaatgaactgtgatcacaccactggactccagcctgggcaacaaagtgagaccctgtctcaaaaaaaaaaaaaaaaaaagaaaaaaaagaaaactagttgtacaggttttattctgatagagaataaaagaggcagatcgacttctaacagggtggtcagaaaagaagtcctggagcaggcaatagttaagcctttaatccacacagccgtctaccctgtgaaatgtcctgggggttctattcaacgccactcccttcatgaagcattcctgccttctttgtgctttcatggtattttagctatattataatcttttcaaatgtatccttgcacagtagttatttatacatacatgtcttataaccaccatactgttataaactgtaaaactgtaaaaaaaaaaaacctgtataaaaaaagttagaatctgttgaacacaccatgtgtgttatttcttcctgcccctgtgaatagtgtaagggctgaactaggactacatgtaaataatctcaattgttcttcagaggaaccctatggagtagagaggctgtgttttccccaccatgccttactgcctctccctttctggctaatctctgtatccacaaagtgcaaaacacaatgtgcacaggccttactacatcaatgactcctgagttgaactggaagaactgagaagtatgatgtgacatctgaagaccaagtgacctcacccgaacttagactacaccagttaactctgctttaggcctgtggggctaccagcaagactgttttctttctatcagaggtgtgttagcctcaggaaatgtgaacagatcctacaattactcagttaaaatccaactcaaccttgaaaggtagaaaagctgtaaacacataggtgactataattaatactgagcctcctcagcaaagacaaggctctttcatcgttccaccatttcctgagtacttactctgtgtgccgggctatactggatacaaggataaaaagccttattttttgctctgaaagaggccacagtctaccagaggagacaagcaagcaaagaaattatttctatataaggaatgcacattatgaatgtgggtgagaacagggtgattgttatggcagcaaagaggaggcacaacccaactaaccagtggtacacaaggccgtagcgaaggcaaactcaagagaagctgataatgtctgtcctggcaccctgctcacctcttttccagcctcgtcttctaccacatggccctctcccacttcatattccagaaatgctctggacatacgctttctgaagtctccaggcttctctacatggatttcctcctgcctggaatgcattcctctctcgcatcattacaaaaaaaaattactacctcatcctcaaaatgttcattcaagtgctgtcccctctacaaagttttctaggacaaccccaggcccaaaggagaatgctccttctctgatcctatgacagcttccagaacagtcaccaccacactgtgctgtcactgttttgaaggttggctcagcacagtgaaaagagcccagctctgtagcctgaaagtcccacgttgaaatgctgattgtgccactttctagctaggtgtacctcagttacttcatctataaaagggaaaactaacttccttacaaggttgcaaggattcaaagtggtgtgtgtacaagtccctgaccacagcaaaggctcaaaaagtactcccagtgactgataaccatcaataactttatactgtggtattaaacaaaacacacacaaaagtacattacaaccatatgtgtatttttgcatttggcacgtgatatagttttgctgtgtccccacccaaatctcaacttgaattgtatctcccagaactcccacgtgttgtgggagagaccggggggaggttactgaatcatgggggccagtctttcttgtgcaagtctcgtgatagtgaataagtcttacaagatctgataggtttatcaggggtttccgcttttgcttcttcctcattttctcttgccgccaccatgtaagaagcgcctttcacctcctgccatgattctgaggcctccccagccctgtggaactgtaagtcaaattaaacctctttttcttcccagtcccgggtatgtctttgtcagctgcatgaaaacgaactaatacagtaaattggtaccagtagagtggggcattgctgaaaggatacccgaaaatgtggaagcaaatttggaactggataacaggcagaggttggaacagtttggagggctgagaataagataggaaaatgtgggaaagtttggaacctcctagagacttgttgaatggctttgacaaaaatgctgatagtgatatgaacaacaaggtccaggctgaggtggtctcagacggagatgaggaacttgttgggaactgaaacaaaggtgactcttgttatgttttagtaaagagactggtggcattttgccccaccctagagatttgtggagctttgaacttgaaagagatgatttagggtatctggcagaagaaatttctaagcagcaaagcattcaaaatgtgacttgggtgctgttaaaagcattccattttaaaagggaaacagcataaaagttcagaaaatttgtagcctgacgatgcagtagaaaagaaaaacctattttctgaggagaaattcaaaccagctgcagaaattgcataagtagcaaggagcccaatgttaatccccaagaccatggggaaaatgtctccaggccatgtcagagaccacacggcagcccctcctatcacaggcctggagccccaggaggaaaaagtggttacgtgggctgagcccagggtccccatgctgtgtgcagcctagggactgggtgccctgtgtcctagccactccatccatggcttaaaggggccaacatagagcttaggctgtgacttcagagggtgggagccctaagccttagcagcttccacatggtgttgagcctgcaggtgcacagaagtcaagaattgaggtttgggatcctctgcctagatttcagaagatgcatggaaatgcctggatgcccaggcaaaagtttgctgcaggggtggagccctcatggagaacctctgctaggacagggtagaagggaatgtggagtcagagcccccacacagagtctctactggggcaatgcctagtggagctatgagaagagggccaccatcctccagatcccagaatggtagacccactgacagcttgtaccgtgagcctggaaaagccacagacactcaatgccagccagtgaaagcaactgagagggaggctgtaccctgcaaagccacaggggtggagctgcccaagaccatgggaacccacctcttgcatcagtgtgacctggatgtgagacctggagtcaaaggagatcattctggagctttaaaatttgactgcccactggatttcggacttgcatggggcctgtaacccctttgttttggccaatctctcccatttggaatggctgtatttacccaatacctgtacccacattgtatctaggaagtaactaacttgcttttgattttctaggctcataagcagaagggacttgccttgtctcaggtgagactttggactgtggacttttgggttaatgctgaaatgagttaagactttgggggattgctaggaaggcatgattggttttgaaatgtgaggacatgaaatttggtggggccaggagtggtatgatatggtttggctgtgtccccacccaaatctcaacttgaattgtatctcccagaattcctacatgttgtgggagggacaaatggggaggtaattgaatcatgggggtcgttcccatgctattctcatgatagtgaataagtctcatgagatctgatgggtttatcagggtttccacttttgcttcttccccattgtcattatgatgttagctggttattttgctcattagttgatgcagtttcttcctagcactgagggtctttataattcagcatgtttttgcagtggctagtaccggttgttcctttccaagtttagtgcttccttcaggaacgcttgtagggcaggcctggtggtgacaaaatctctcagcatttgcttgtctataaaggattttatttctccttcacttatgaagtttagtttggctggatatgaaattctgggttgaaaattcttttctttaagaaggttgagtgttggcccccactcttgtagagtttctgccaagagatccactgttagtctgatgggcctccctttatgggttacccaacctttctctccggctacccttaatattttttccttcatttcaactttggtgaatctgacaattatgtgtcttggagttgctcttctcgaggagtatctttgtggtgttctctgtatttcctgaatttgaatgttggcctgccttgctaggtttgggaagttctcctggataatatcctgcagagtgttttccaacttggttccattctccccgtcactttcaggtacaccaatcagacatagatttggtcttttcacatagtcccatatttcttgaaggctttgtttgtttctttttactcttttttctctaaacttctcacttcatttcattcatttgatcttcaatcactgataccctttcttccacttgattgaatcagctgctgaagcttgtgcatgcatcacgtagttctcgtgccatggttttcagctccatcacgtcatttaaggtcttctctatgctgtttattctagttagccattcgtctaatcttttttccaggttgttagcttctttgcgatgggttcaaacatcctcctttagctcagagaagtttgttattgccaatcatctgaagccttcttctctcaactcatcaaaatcattctccatccaactttgttctgttgctggtgaggagctgcattcctttggaggagaagaggcactctgatttttagaattttcagcttttctgctctggtttctccccatctttgtggttttatctacctttggtctttgatgatggtgacgtacagatggggttttggtgtggatgtcctttctgtttgttagttttccttctaacagtcgggatcctcagctgcaggtctgctggagtttgctggaggtcccttccagaccctgtttgcctggtatcaccagcggaggctgcaaaacagcaaatattgcagaatggcaaatgttgctgcctgatccttcctctggaagctttgtctcagaggggcacccagttgtatgagatgtcagtcgacccttactgggaagtgtctcccagttaggctactcaggggtcagggacccacttaaggaggcagtctgtccattctcagatctcaaactccatgctgggagaaccactactctcttcaaagctgtcagacagggaacaattaagtctgcagaagtttctgctgccttttgttcagctatgccctgcccccagaggtggagtctacagaggcaggcaggcaggcctccttgagctgcagtgggctccacccagttcgagcttcccggccactttgtttacctactcaagcctcagcaatggcagatgcccctcccccagcctctttgccaccttgcagttggatctcagactgctgtgctagcagtgagcgaggctctgtgggtgtgggaccctctgagccaggcacaggatataatctcctggtgtgccatttgctaagaccattggaaaagcacagtattagggtgggagtgtcccaattttccaggtaccgtctgtcatggctttccttggctaggaaagggaattccctgaccccttgcacttcccaggtgaggcaatggcctgccctgctccatgggctgcaaccactgtctgacaagctccagtgagaagaacccagtacctcagttggaaatgcagaaatcacccatcttctgcatcattcatgctgggagctgtagactggagctgttcctattcggccatcttggaacctcctcactttgctcattttagtgtttagaaacacagtccaaatcagaaaagctcaacaagccctgctattatgcaagagcaaaaatattgagaaggaaaacaaaatggtgaataaataaaagcctaaagaaaactagagaggaggaaatgtgtgtttttcccatctgcccttatggaggaaaaaaaaaaaaaaaccctctgcaaggaaggacttaattttcaagggaaaacctataaactgctaagccactgccaagtgcctgctcccacaaacagaatcatcttcctacaataggaagtcattttcactgtgcaattttccctcttctagacttgcatgctttatgcctctcttgcaacactttatactcatagtaaaggcttttgcttccaggtcttacctttccattatgagagaaacattcttctttttaaggcctttgtggtctagatcagggttatataaaatggaggttgtgatccatttgtaggttaggaattcatttagtgggtcatagtgtttttctttaacaaaatttcatgctattcagcaaccaagttacagaatttgaaattatttctattaagaaatcttaaaaatctaagtgacctgaaccattatgccccggtgagtgtattaattctcacttaatggctgtgtgtgctctctacttgagggacaaccacccgttcaacgtcatctgaagatgtaattacagttcaggcagcctcacaaagtagagcacaggtaacatccaaatgctacagacagtaaggactagggcacctgggggtaggacagcccccgctgggctgagtcagcggggaaggtttctctgaagatgtggggtttaagcagggccctataaagcctggattggacaaaaggagaggagaaaaaaaacatggtgccagctggcctgggctgaatctaaaagaacagagggactgaagggggtattataataagttagcctggaattatatggtacaaactggtaaccctgggaaagcaaagaaggggcagaaacgaggatggaatcttggaaatgtcttggtgattgactggattttggtttggatgtgaaggtgagagaatcagaaaattccaaagttttctatcccatgtgaacaggagagtgcaactgacccttgaacaacagggtgattaggggcaccaacccaccctccacaacccacaaatggtcaaaaatctgcctataacctttgactcccaaaaacttaatagaacatactattgaccagaagccttactgataacataaagtcaattaacacatattttgtatatgtattatattctgtactcctacaataaaataagctaggtaaaaatgttattaagtaaatcttaaggaagagaaaatatatttattattcattaagtgaaagtggatcatcacaaaggtctttatcctcatcttcactttgagaaggctgaacaggaggaggagaaagaggaggggttggtcttgctgtctcaggggtggcagaggcagaagaagtggaggaggtgaaaggggagacagaagagatgtattgaaaaaaaacgtttataagtggacacgtgcagttcaaacccatgttgttctagggtcaactgcagtagtattcatagtaatgtgaaaaattcagagaagttttaaaaagaagtgttatgtaataacattaacatttgctatagaagttaaacctgttttggacacctgagttgtgctgagatatccatattagggacactaagcagtacagacagaatcccattctgtaggcactcactacctgggaggaccaaagctgatactgagccagttctttttttttttttttttttgagacggagtctcgctctgtcgcccaggctggagtgcagtggcgcaatctcggctcactgcaagctccgcctcccgggttcacgccattctcctgcctcagcctcccaagtagctgggactacaggcgcccgccactacgcccggctaattttttgtatttttagtagagacggggtttcaccgttttagccgggatggtctcgatctcctgacctcgtgatccgcccgcctcggcctcccaaagtgctgggattacaggcgtgagccaccgcgcccggccgagccagttcttaaaatactgaaatatttccatatgagttggagaaaaactacctgtgcaacacacacacacacacacacagccctactgccacagacccttttttagatctccagacctaaagaacgatgatacttcaaaaggcctcaactccatgactagcttctgttcccactggccagtgtctatgccatattggtagtacaatactggcagactgttgacaaaaccaagtactaatggtagaagaataacttcagcttgagccagttatttgtctgaagagctgatgaaggcacacactgagatacactgatgggtggagtcctagcactcaggctgctcacagtctaacaggataccaacatataaataaataaagcaatgcgatccagagtagcagcatcgaagtagctataaagtgcaataagaggcacaaagaggatagtagtcagttacccagcccatggcagggaggcaaagcagttcctaacaagaggtgatacaagacctgagcagtgaaagatgaacaggagtttgctagggagagaaaggaggaagacaaaccattccaagctgatagacagcagcactatgtaagccacaacccaatatactgtgtacaaaataatgaaatgaaaaatgtgtaatgtctggcacacagtgtcaataataaataacaataaataataaatattagagtttttctggcagatttatttctctgattatgtttttaaaggttgatcctaaaatatatttgcattgtctaagcctacactagctaagcaagggatgggcattcaagatatcccggaaggcaggggtcagtcagtttggaatttaaaaataaagcacgtaaaaataaattcacaacatcaattagtgttgactgcacttgttagatgtgtgtaagcaaagatgagacttggtgctgctgcaggcctctcagatgcacagatgagtgtgacccaaggttgcttaatgaaatcacagaagggtggttggtaagtgtaaattcccatctcttttaaagggttgttgtttttttagaaattagactacataaaaaggcaaaccacagcctgttttagtctgcactggtcactgtcatctagagccaattgttcaagaggaaggaaacactcaacgccaaggagaagagagtcatcaccgctgctttccaaaattgttgtatgagctgctccctcaaaggaagaggccatcagtgctcaggaagaggcagagatttccgacagttttaaaggacagtgtctgcagtgtgacccacagttcaagctgcataaaaatataaattcactgacaaatgataacaagtacttccttactttcctatctgctgaatcacagccattgtttgggttgtagttcctggtttaaattagattattcaatcacaatgatgctggccaaacatgctggtcatatgccatcaggaaaacttatcaaaaatatcatttgtgctgggcacagtggttcaggcctgtaatcccagaactttgggaggctgagtaggaggatcacttgagcccaggaattcgagaccaacctgggcaacctgtagaaaccccatctctacaaaaaaatacaaaaattagccaggcataatggtcatacctgtagtcaagctcctcaggaagctgagatgggagaactgattgagcccgggatgtcgaggctgcagtgagccatgatcacaccagtgcactcccacctgggagtgagaccctgtctcaacaactacaaaaaatccagttgtgtcaagtcttaaacatataaacacacatacttttgcactaataaaatttaatctgtaccaaggcaccttttaacacccttttttccctccttctgaagaccacaaatgttctgatgtagtggaaaaagaagagaatttgcagacagacctgactttcagtgccatcttggccatttattagctacttaaccaagttcatggctttcagcttgttttctcaaatgcagaatgaaaaaaataacacctaccagaggagtcttgtaatgatttagttggataatacatatgtgcaactgcccagcagcaagggcctgcaggaagtaaaggcttgatttattactaatatattttgaaaggttttactagcacacacctcccagctcaaacaatatatgccatcagtgctcaatattgtcatgtgaaagaaaaaatatgatataaaacttcagcaatttgttctgagtggtcacttaagaaaccatgacttgcaaagtaaaattacttttttaatggcagctatcttggaacagataacagaaacagggtagtgtcttcgtgacagtaagaacctcttatacaccaaatatgatgtggcctggtatatgacatgtttttctttttcctttctgttcagttatagtcaccaatgctgtgacatgtgtaatatatatttaatatacattcctcattgtataaataactgagctatgaggaatggtacatattgcagaaatataacatgagtgctttggatattttattttttaaataacctgtgacatcactttcattgttccacatactgaagattataaacccacatctcaagggactatttatttccccttagatggcagaataatacaactacaatcatggtccaaacagccaggcttctcataaatgtggttaaggagactagcttaaattttcagtctaatatccttttaaattatacactttattaaatagaagaacgcatttttattctaaacaacatgttaaaaataagaccagtctccaggcttttaaagaaaacaaaatacttaggtatagttcatcagatttgactccctagtctaagagctggtagactttcaaaagcagaatgcaagatagggacatgcaaggacctttcactcttccaagagtgaaagatgaatacatggcagtgaccagtccatgcagcatggattagagacttttacacaaactctataacttattccaagccaaattttatactcaagttgttgggaaagcttaaaatggataatttgctcatggactgagcaccaagcttcaggagagaaagttctatagtagtgacttcactcctgcctcaccaaagatgtatcttcctttattcccttggataggacctttttgtgatagtcaatggaggtctcttaacatccttcactcaatgaatatatagagctatccaaaataactcatagagttattttagaagttttcatagtccccttctgatgctaacatagttcccattaatttaaatctcttctttctgtaacacaaagtcaaagtcagaagaaagttctgtataattgaaatctccattatatttttgctgtccaaaattacccaacctggtgttaggagaactaaaattctgcttattcttcaactttattactgtctaatatgggttaatatctctaaatcagccatgaacttcctgaatttttttaattcttaaattttttgacagggtgtcattctgtcgcccatgctggagtacagtggttcaatcatagctctctgcagccttgacctcctaggctcaagtgatcctcctgcctcagcctcccaagtagctgagaccacaggtgcacaccaccatgcctggctaatttttgtatttttttaaagacagggtcttgctttcttgctcatgctagtctcaaactcctggtctcaagtgatcctcctacctcagcctctcaaagtgctggaattacaggtgtgaaccaacatgtttggttgaactacatgaattaaatataagccatgaattgtaaaaccttctgtctatttctgaaatatgaggcaacatggtacaagggctgtgatgctgacagagccaggtttaaatcctggctctatcacttatcagctgtgcaatcatgcataaatcacttcagcctctgagccctttttcctctataaaattgtagtaactccctacagggtaaaagataaatatgcatttattcagtgccatcacaagatgaatacaaaacaaccatactctgatcaactgtgttctgtcccacaccatctcaacaccaagctatgctcttaaagtcaatgaaagctacagagaaggaatatccacaccgtgtgtatgtaaatggaaataatgacaatactgacctcacagtgttggaagcccacctccaaggtcatcatctttgaccctcccatctcagtcttactgacctcttttcagttcctccaacacagcctggtctttcctaccttaggatcttgtacatgatataccttctaccttgacagaaatctttatcatctcccttcttctagttcactcctaatcatctttctggtctctcctttaacatcattaccatctataggattccctaatactccagacttaggatcccattatagacatctcatacttccttaaagcatacatcacacctttaattacttgtgactatcttctttctcactaaactgtaagctgcatgaggcctatgtttgctctccatttatccctagctattaactcggagtatggcacaaaggaagagttcaacaaatatttttaaatgaatgtatgactgtgctgttttactgtgtaactgttaggtattatatcaactatcatagagtgatacttcattgttatctgttggagctcagaaaacaataccccaaagtattgatactatgtcaactatcatagagtgatacttactgttatcaaagtattgttccttgggagtactttgaactgaagaacactggaagagtctcagaagcaaagtctctttccctcttctgtctttctctctcctactcctctttctcccccaaggcaggtcatagaaactaggacccttcttcctgaaagccagccatgaagcctaaaaatactaaatctaaccttccccttcctttctgtataggagctggttacaaagaaattatctgacctaccttgtcccatagttgatcttaagaccgtcattccaaaaggggtctgacactacatccaggaggaaagaatgccacacagagaccaagaagaatcagaacagatagaccttgctgagtttccccattcagactattaccactaggatctttccctttttgttccatcacttttctacaggactgtccattcttcatcaaacgtaagcctaaaaatgaagagtttcccctgagttttttgggtcttcatttctgaagactcccatatcacataaaactgtgcttaaatacacttgttatgcttttctcttgttaaactgtattttattataggggcattgaccatgacccttatgatgggtgagaaaaagtatcgcacctttctgcccatacataccgtacaaccaaattgcagggctgctcagagaaagcttctaagaaaatctgcctttaacaaatctgtttctcctaacctgtgtggtcaatctgcaccatatgagcagcaggaaagacagcatcatgggcttgacagagacacagctgctgcttctctccagccgcagcaccacagggcaacctgaactaacatgtatgccatagaaagtaaggatttacaaatatacacagttaactggcttccacttgcaaatgaaaaaccgaaatcataaaaagtttactttaacactccaataataaatacaggtggtacacaattaccacagaagtagcctgtaaggagacattcctcttgtgttcattctccatcccagccctcgcccatacacaaaacaaagaaaaaacaagaaatgcagcattccctcccttaatcctttctctgtagatatgttgggagaaggaaaagcacaaacttctagccacagcttccagaccccaaaataagaaaattaaaacaggtaggtctgtctttatctgacattctatcatgctctccaaaggatgtgagacagctaggatccaagtttccttaaccttcccctcctccatatacacacaccttccttacctcagtgtgtagaaaaatgggagagaaggagggggaaagatagagattcatcagatttgtgaaaataatactctaggaaaaacaatgtcacatgtgctatggaggagtatggatgtttacaagacaggattcctgctttaaatgtagaataagagaggagtataaaagattatatataacacaaggctagaataagacatgtgccataaaagtacaaaaaaagatttgaccaatcacacactgtccaggagatttaaaaatgggctgggtgcagtggctcccacctgtaatcccaacactttgtgaggtacaggtggaaggaaagatcacttgaggccagaagttcaagaccagcctgggcaacatagcaagaccccatttcttttttttaaaaaaaatatccaggcatggtggcacaagcctttagtctcagctactcaagagcctgaggcaggaggttcacctgagcccgggagtttgaggccaagtctgcagtgggctatgatcacaacactgcactccagcctgggtgacagagcaagactctgtctcaaaaaaaaaaccaacaaaataaaaaagaggaagaagaagaaggagaaggaggagggatggaggaaggagggggaggaagagaaagaaagaagaggaagaggaagcgagaagaaggagaaggatgacagctcctggaggaggcagaggcagaagcagcagaggaagctgcagaagcagcagcagaagacgcagcagcaggagcagcagaagcagaagaaaaaaaacagctcctggaggaggcagtgttagaggtaggggttaaaaaatggaatgggattgataaaagaggtaaggcccatgggagagagagattccaggcaaagggaacaatgtggattaacacatagacaggaaaggaatgggcatatgtggtgaatagataagcaaaatggaaaggcagttagggccatagattgaaaggccttaaatgctacaggattttgttcttaataaagcaaacaataaagagtcgcagtttctgaaaagaacagtgattcaactggaggagaggtgatttatgtgacaacccatgggagctgtaccggagggggaaactgcaggaagctaggaagaccaactggtttactcttctagtagtcaggggaggcggtaataggggctgcaaaaaggggctgtaatcactcccttgcatgcaattctcactacccaggcctctctcacctttttgttctcacttggcaaaagtgcaattcaccaactccacagccatacccaagaaactgaatgtagctagagaaacatacagccacatcaaatggccttactaacttacataacagttacatcaaatggccttacaaagttagaaaagctgccctgcaatcaaaccatatgcccctagtgcatttactttccttctctgctagaggagcatttctgttctctccctttctcactctcagctgatgaccttccatcttattttgctgggaaaagggaagcgttctgagaaacagcacacaagttctcactaccataccaccttcttaccttcatctgtgcctatatgatgtgcctaacccagtttgactatggtcaaactgttcatgctcttgttttttcattagatcccatttcctcttgcctaagatatcccactaccaattctatttctttcttgttccgtcactttctcactctctcggctcatttcccttagcatacattcgattatttctcccatcttaaaaatgggaaccctctccccctccatctaccacaccatatttctgctccccttcacagcaaaattccccaaaagattaccacactcgtggtctcaattcagcttctcccattctctcttgcatccactccaatgaggctttcgcctccactcaccctctgaggaaattgctgtcaaggtcaccataacctccacattgctaaatcaagtggccaattcccagtcatttatttaggcactactggttaccttcttacggaaatgcttttttcattaagtaatcagggtatcacaccctcctggttttcctcctccaactgttccttctcagtctccttaactggttccccatttccctgacttctaaatatgcagtgttgagaagatcatctttaaaagaaaagatcatcttcactaactcctttgttgctctcttccaatctcatggttttacataccatctgtatactaacagcttcaaatttgtattacttgccccacctttcttctaaattcttgacacaataccatttctgaaaccaagttcctcttctccttccttccccaaacctactccttctgcagctttccccttcttggtaaatgacaactcctaccttctaactgctcaggccaaaaaccttggagtcatcttcaattctttatctcacaacctacatctaattcatcaactatacctctcagctacaccttcaaaaatatccagaatctgagcacttctcagcctccaccactaccacactaatccaagccaccatcgtctctaatctgaaattttgcaacaacctggtctttctgtttaccccctttcccctacatagtctattctcaacacaatagccaaagtgtttcttaagatttattaatcagagtcattcttctacccctaaagctccaaaggcttctcatctcattctgatttacggccaaattccttacaatggcccagatgtccccgcattatctggctccctgaacctcctttctgtcctcctctagtactctctccctggggcatgtccctccagacataccatcctccctacagttcctcccactgagcacacacctacctcagggtttttgcacttgaccttccctgcctagacattccctgtgcctagaatgtttttccccatgcctagaatgctctttccccagtgcctcgaatatagtaggcacctaataaaaaattaggtaaatgaatttagacagacattgaacattcattttccattttgcttttttcatttattattaacgcataaacattttatcacattgtcagaatactttaagaccataattttttgggctaacaatattccattttatagacataccacaagttatttacaatttgggactgaaaaaccaggatatttacaaatgggatattttggatgtttcttcctttgatatttgtgaacttcacttcacttttagaagtgaatctactagtgagaatatgtacctcacaggattgttgtaaagctgaatatgaactaataagtggacacagagacatcagttttgttactactgcttagattacagagacatcatgatgtcaatgaaagatcatagatcttgaaagaaacagataaaaaacatgactcacaatattgtcctttaatagcttaagacacttaacctctatgagtttcaattaaaccatctatttcaaaaagcgattatattaataataattaaaaagagatgtaaaagagtttagcataatattgagctcagagtagataatcaataaatgttcattcattcacttctcataaacaatacctagggtttttaaaattgtgaaccagaaagaaaaaaatatttttataaattatcccattacatacatattgttaaatagataataaaaattttcagtacagaattattctttttaattaacaattactcaacacttaccaaagcacacttaagattacaaaaatctatatatcaattttgtttcttttattataataaagctaggcaaaacaattatttttaattactgaatgatggtatcaataaataagttcctttttatcatgtgctttaatgtacacacacaacaggtcagtaaactattataatgatgacaagttaagcaagaaaacattttaaaaattcgcctcacttcagggctatttcttgaagcaatctgtgtgttggagtcagatgaatgccaagacattacaaaattttcagtgttttccatgttgtttcgatataagtttgagtatatgcagttggaatggtcaacaagtacaatttgaactccttcagggtatagtcatctatgcctggccaggacctagcccagtgcctgacatacaaaagacaccagatcagcactgagtaggtaggtaggtgggtgggtaagtgactgattgagtatggtagtcattagtgctgtctgtctaggcactacaaagccaatactttttgtctccctaccctgtgattgggtacagtcatttaaccagttctagccaaggaattgtgagaagaagtgacataagtaatttccattttggagcattcatatgagatcttccatgttctttttccactgctaagtgttcatgaaagcatatgctaaaaaggaaaccccgatcagccacttagtctctgagtgaaagcaggagcacagccccctgctcattcaattggaagtttatgacagtaagggtcatacattttgttaggttaagtgaccgaaattcataaattttactatagcagcaaaacctaacttatcctggataatacaagcaagctaatggcattcatttcagcactagaaattaatcagagtttaatttcagaaaaacaaaatggtacagataagtagtatagctcagtataataatttaacctctctatatgatagttctcttgctcgccgagtttgatggctcctgcctgtaatcctagcactttgggagaccaaggtaagagaattgcttgaggacaagagttcaagaccagcctgggcaacataacgagatcccatctctacaaaaagattaaaaaattagccaggcattgtggtgtacacctgtagtcccagctacccgggatgctgaggtgggaggatcacttgagcccataggttcaaggctctagtgagctatgatcacatggcttcactccagcctgagtgacagagcaagatcctgtctaaaaataaacaaacaaaaaggatagttctcttgcctacaaaatggaataatagcatctacctcatagaacagtaatagggattaattaagtgaatgtctattaagtacttaggataatatttacggtatttgaagctttcaataaatggtagtaaattactatcattaataatgcattagacacatttacactacatatgtaattttactttcatctcttactccttattcattttaatttatggtcaattttttcaattcataatatctttattaagaagtaccatatcctgtcagaaccatataaaaaaataaaaagaagtaccatccaaggcactagaaatgaagacaaataagatctaccatcaaggtattctccttacctatgattctcctttcttctgcaatagacccacaaccaagcaaactttaaaatcataaacacaatgttttattatattataatataaatcaactatgcaatattataaatattgtaccaattgaagaggtgattactttttaatttaaaaacactttatatgttatgggtctgtgtcttattcaaagtcaagatagtaaagttgtttaggtccaattcatcaaaggcaattaatgttatggcaaaaaacaaaacttgtacccacattcccactgttcctaacgcagtgccctataaacaggaggcactcagtgaacaaaattataggtaaatcagagatcagcagatccaatccatttatcttacaaattagtacaatgagatctagagggttaggcaacttgcccaaaagtatgatgtgatttagtggcagggctgatcctagaacccaaactttgaaaatgttttaaaagtctaaattctctaaagcacaaagttcctgcagtatgctgacagaggaatataaacaagtcagtgaaaaacctaaagttaatttttattgaaattagattttagcattagctagtaagaaatttaaaactcagctatcagaaagacagtgttagatttactattgttatcaagagaagaaggtacttccaaaaacctaaaagggtaaattcattaccatatttccccccaacactttatcaacacttaaaatagcatagaaagaaaaatagaaatagtttcatatgcttctttttatgtacagaatcttgtgtgaaaagaatgattttaagcaagaaaaaaggttaattcctaggccacaaatctattaaagtattgattattttaatcctattgattttaaaaaagtgaaggggttaattaaagccatgtacattaggaaactgcaagataaaaataatgtttatcatttattgtttactaactgttatgcactgtgctaaatatgcactttacacataccacctctttttacaacaaacttatggtataggtaatataattatctccattttgctgattatgaaaataggggctgcctctgagtaacttactcaggtagtggcagaaacagaacttgctctcaaacctgtttgcctctaaatggtatgctttaggttttgttgtagttgttttttgttttttgtagagacagggtctcactatgttgcccaacctggtctctagctcctgccctcaagtgatcctcctagcctctcaaaatgctaggattacaggtgtgagccaccacacccagcactaaaagctgtgcttttaaccaccctcctgttcaagctctatcaagtttctgaccctctataatttagatcaaggtcaatccatcatatctaaggggaaggctacatgatctctaaggccccttctaaaaatgattctgtgtcaccaaacacataaatcagttctgaattcacacaatatttctgacaggacactccaggcctaagggaaagtccatcaatagatgaacagataagaagaggagaaaggggaagaaaaatttaaaggaggaggagaaagatctttatcaacatgccctacaaggtgcctaacatagctagacataacattttactagacatcagggccactgtgacaaaggtgggaaaggggaacctagaacagcaattgaaagtggaactataaaggatgtacataaatttaaatagcttagcccactgatgtgatcccctcacagcaaatgaggaaggagctgcagaagtcagtgaccatgagctcaatgctgggccaacacacagacttgtaacagaaacaatgatcagcagttaaataggaatagctgggtactaagttttcagaagaggcattaccactattgtcatgcatttggatgagagtgtattttcaggacagagttgtgaaggaactagcacttgttccatcaagttgtttaaactcctaccatgttttatgcaccatccatgtggctttcatttgttacgacactgaactctgacaacaaccttggtggatgtgatgattaattttatatgccaactttataggccatggtgcccggctatttagtcaaatatcattctagatgtttttgtgaaggtattttttggatgagattaacatttatatcagcggactttaaatcagtggactttaccctccataatttgggtgggccttatctaatcagtttaaggccttaatagaacaaagtttgacttcccctcactttgggaggccaaggtgggtggatcacttgaggtcaggaattcaagaccagcctggccaacatggtaaaaccctgtctgtattttaaaaactgcaaaaattagccaggcgtggtggcgggcacctgtaatcctagctactcgggaggctaaggcaggggaatcacttgaacccaggaggcagatgttgcagtgagccgagatctcaccactgcaccccagcctgggcaacagagcgagactccaactcaaaaaaaaaaaaaaaaaaaaaaaagactgacttcccctaagcaagaagaaattctgccagcagaatgcctgggcatccaaactgcaactcttccctgggtttccagcctccaacctaccctgaagattttggacttactaagcctccacaattgcatgagccaattccttaataaaaatctctctcatagagagagaaacacacagacacacaccctaatacaatagatattgctcccaattttaccactgagaaaaatgatggcctgacaggacccattctccctcttcactacatcacacactaaaatgtgtgatttgggactcacattctagcctgaggggctcaggtgggaggtacaaggtaataagcatgcaacattgtaaccacaagccacatattccagagagccctttatgacactgataccacacatactacacatgtacccagagcctcgatgtgcccaagtgatgtactatcctctctctggtctcctaattcagttatttcaggtaaaagaaatcaaatagtcctacctaactcaatatttgaagaccttgaaaaaggaggaaaaaataattagtaaagaattaaagtaaaagataaaaagaaaaataaaaaatgatttgtgacaattaaatgatggtagcctttgctttgtttaggttctttttgaataatcatgcattcactctttcaacaactatttattttgtgctttatacttttttataggctcttctaggtattgtagagtactaacgagctggagggacacatacaatatagtaaatgtgcaggatgaaaaaagaccaactaaatttccttaaagaagtcaaagattcgcagaagaggtgagacatttctgctggaatagaattatgagtttaaatagtggggaagagggatggtattccagacagaatttctgacacagtaaaagtcacttgagtctgttaggttgctaaaagtgggagctgggatggggaattatggcagaatataaagttggaacgaccagctagggttacatagtaaggaacaatggattcccatgccaaggtgtttggcctttatcctgcaatcagagttatgaagaatttctaagcaggggagggataagaccatgggctaagccttcttagagaccactccataaaaccacatcctttatatacatagaaggacagctgggtccagcttggtcactggggcagatataaccacaggtaaatcattataaagtttaataaaaattaaaccttgaataaaaaactaagccttacagttttaataataagtttattactagaaggcatcaaagtatttcatgtgctctaacttaaaaacttaaagttgagttcacacatagtcctaactaaaaatcaatggttcagaaattggcaactagtataattataattatgcaataaatacatatgtaaaagttttcctcagaaaatgaaataaaactcaattggaatagacagaagaaaaattattattatggtaataaatacatacgtggaatctgtatcctaaaatataaattaaatataagccagtggacaaaatgtggctgagtaaagctggactttgcatatcatcaaaaatggaaaaagaaacagtgttgaattatatttctaaggagtgtagtggccaagaaaagaatctacaataaaggaacataaattaggaactaaggtactaacaactcatttgttcccttcctcttttctgctgatagttctctttttcatcaatcccaatgggattttagagatctcccaatccaatagtcctccccaccgttttactttagcagttgagttctgcaaatagttgtatataaaatcccagcatataaaacaggtaaaagctgaaagagatccaagagagggtactagagcacctaatttggcctccacttcagccttcatccactttccctctgaaacagctccccaaagagcccttaattttcctcagtaaagtgtaaaacacattggtccttgtcccaaccctcctaatttacaaatgagggaattatgccctagagaattaatttaagggagttgcctgagaaaaaagattatttcctagtacccctgctaaaattaaaatgttttctcttcctcataaacttgaactcaaatgtctgggttaaaaattgtttcttggctggggacacagtggcacacgcctgcaatcccagccctttgggaggccaagacaggggcatcgcttgagcccaggagttcaagaccagcctaggcaagatgacaaaatcccatctctatttttaaaaataaaaaaatttttaaattatttctaagttattctggaagtctatgacatccctctaccacaaattcccattccaaattcacataagggctgggctcagtggctcacacctgtaatcccaacactttgggaggctgatgcagaaggattattgagcccacaagttcaagactagcctgggcaacatagtgagccttgtctctgcacaattaacaacaacaaaatttcacataggtctataaccacatattatatgagtgcctacttgaagccagatactctgctaagagtacgttatctgctctcattcaaccatcaccacaaaccccaagagatcaaggaactaggctcacagaagtactgtaacctgcccaaggtcacagagctagcagggtggaatccggttctatctgactcctaaagccaagcttcagacccttgcactctttctaatcccaaccttttccaaatcttttcctatttttacacaggctttcagaaatgctgaactgtaaggattacttgtcatttcacagaggatgtacttttccatcaagacctgtgggggaatgcctcatgctgcagccaagcacaaaggcatcaagcccaaaaacctctaatttcacgttacagaccatagaaaggctaatccccacccccaccacaaactcctacaactccttttacaagcataggctacatacattcagtcttatggggaatagggactgtcaacaattcttaataatagggctacaaaatcagctctgagctgaccccttctgagaggctggcttttaggatggataactatccaatattttctaataggtaaagatattaaaatttgtatttagggctgccttggggcaaaggatgactatcaccgcagactaggtaccagagctggcatttaataatttgaatttgagggaaggtcaagggagttcggattggggcaccctctgggagcagagggagttgaagtgactgtcgtgtccaattacagaaaagcctgaatcaagagtatgcagccaaaactactaccaaattattggtaatgggaggagaaaatttaaacagaactgggatttgggaccaccttctggaagatgttagccaaaaaccgaacagatcctaggcatcaaggggtgtgaatttcgaggtaggctccgttgcccgggctctgagggtcagggttcccggcggttgggcctgggacggcgaagcccccgctcccccttaccttctgttggaagtagagaaccgaatagttcttggctacagccgggagggatgtggggttggttggcaagtgtaggctgccgagggcccttaaggccggccggagggctatggtggcccagggcgccagaaaagacagaagcaggagcaggagggctcggcggcccatggctcaggctggagactgcagtgcgggtgggagggcgaaaaggaggccagcagaagcgcacaggctaagccctgcccagcctgcagctccgcccgccgcaaaacagctcctcccaggggaaacccaaagccagccagctcctcagagacgccgcccaagccaggtcaccacagccactccgcccccatccccgaggacaccgcctccactccactttcctctcgtgccatctgctccttagcactcaccttcattgcggtcacaccccaagtctgcccttatcatgctagggcctcttcctaactcatcgctgtagcccatgctttatctatagcgcccccgaagcccacctgtccttcaggtcacccaatatccctaccattatcatcaccaccaaaccctgccctggccaccgcaattccattgcgacacctcctgccttccgcaaatcctacgtaacggcaataacagctaccatgacaatttattgaaggttcactacaggccagtgtatcacgaggcagggaggcacacgcatcatctcctctaactaaatcgtcacagcaatcttgtgcgtcgtatatgattgttattcccatctacagatgtggaaactgaggctcagagaggtgcgggaacttgcactagatcactcagcagtgagcggagcacgtcgtcgcagaccgctgggtccaggtccaaagactgtgctccttgcacccacctccatctggagcctaaccactccctatgatactccgttcttgggtcaccccaaaactgtgttgctcgcacaacccatccattacacaggtcgccccgggtccacatcgcccctaaatcccgccaggtcccggtcccttctttcaaataacgccccctttcttctccggcacccgaaaacccactccgcgctccacccccctcctgcctcctgccaccgcccccttcctccctccgcccgtgggtagtgctagcccctaggacagcgccgggtctggcttccaaagctccctcaaccctcttcatccagcttccattccctctttcagtcaccccgccagaccccagggcgctgcggctcactccacactttcccgggaaccctacgcccaggaggctcagcgaagctccaaaaccaattttacggactgtactactgatccacctgtcggggagaaagactctacccgcagtttgacgaaaatggtcgtttccagatgcttgtaggatttcctcgctaagctccaccctctgcggcgccttcttctgattggctctgagtaatcagagccaaagcgttacttccggcggaaaaggacgcgggagattcgattggaaggctgccggcgtgctactgagttcggccggtccgagtcactgtgcgtcgcctgggcccgttcctggtcttctcccccaggtgagctgggtaaaggggttctcgggaagccgaagagccggagactcctaaggaggctcttaacttcattatgaatgagacccacccagagcccggcgcttgttttttcacaagtggttctctgtaaacgggcagccatgagggtaacagaatataaacgtcagttattttattttagactcagtgcttttgcaatcacctaacgaacgtttattgaacacttacagtgccatcgagctagactcggagtgagcttttagaatcggaaatagagaggaaaaggcgcgactcttgcttctgtaatgtgcaaatacgtattcagtgggccactgtgcagagtagtacgtgctgaaaggggatcttccaaaatgctatgatggcttagaaggaacatattttaactgagccatgtgcttaaaccagagcttgaaagttttcttccttttcacatccagccagtccctaccagcctcttgaatatctcagatctgttcacttctctccgttttttactgacattattttggttcgaccctatgactgctacatagctgtgacagtaacccccccctcccccgccgccccagctggttctcctgctttcaatcttgctaccttccagtccagtctccacattgctgggctgataaagttcatatttgaccgaggcactccccattgaaaacctttcagtcgctcctatttgccctcaggtttaagcccaaactctttaacatgacttacagactctttcctatctgacttttgcctggctcttcagccctagtggttttccaccgctccagccatatagaatgtcttttgtgttcctgaagtgcactatcctccttctcaccccaaaccgtcttctgaccctgtccctgacctggctaattcttagtcagtttgcaaagccttttaaatcagaaaccctttcctgaccccacaggactggatcacagagcaccaagtaattatttgtttattctgcagatagttaaatgcttctttcgtctgtgccaagaattgctaggtactgagatccaatgatgaacaaggtagattcctgttctaatggaacttaccttttatggatggaattaaggagaatttacaaggaaactatgtgaattagactggtctaagaagacctttccaaggagttgatactgatgcctaaaagatgagcgtgatccaaccatgcaaaagagggaaagaaaaacattctaaacagagtgaacaggttgtgcaaacgtcctgaggcaggaaagagcttgacatgttaatgttcaagaatctaaggaaagaccagtatagctggaatatatttagaaaggacagttgtatgagatgagtctggaaagatgggcagagaccggatcatggttaggaggttaatccagcaccataaacaggagataatggtgatttggattaagatgatggcagaatatatgagggaaaagtgaatgatggtttctaagtatggaagtagattcaagtaccttctgatgagtgtgatgtgggatatgaaggaaagggaggaatgacaaatgactcctaggtatctggtttgagttactggttagtgagtagtaccatttactgagatgtgaccttctccatccctgtaataaatgtctcataaatgatatcaatggaaaaactgtatcgtactaagattttcctggttcatgtttttaaagcatttttcatcagtatttctcctttcactgaagattttgtctctttgtttttttgcttacttaattttcactctcctgcctgcctctcttacttttctagaattttcgtgtcaatgttactaaattattttttagggacttattatgactgcctttagaaaaattaaacaagtatgtgccattggaggagaccattagacagtgttaagaaaacaattcaaaacagccacccttcccatagctgaggcctcttggcctgtaaaatatgaaacagaaaattggagaattacaaggtgacaaagattttcatgcaaggcaagaagggtttggagaggaacgaagaaagggagaaaaattagtcatactttcttttctttatgccattagaagtggaactagttttttaaaggagtaatttcatcctttgggcacagtcttgaagcaaatacacatagtttctttcaagtgtgaagcttgagcaaagagagtaatggactagaaagactggtaagctactcatcagaaggcatgagttccagacctgattaacttctctgagtggatcagataatgttgcaaaagcactttgcaaactgtaaagcagtcaaatgaactcaaactggattatgaactttaagataggattcacatcttatacttttatgttctcttcagccccatccccagatgccagtttacactaaatacttaattgaactttttctctaggatctaacatagaataagaattagtttagattttctaatctaacccagtttttctagatcttctagtctagccggaagaagaaaaaaagatgtgttggtatgtgcatgtatgggcacggtttttcataaatgattaagttgccttctgagaacttgattatgaggtagttaagctgaaagatcaccaaataatggattagagtaaagaattgcaaaatcatccaaatgagactaagatgctgtcaggccttggggatttaactataaccatgtttatcacaagtgttacacaccatgagatagtctcaatgactaggctactggttttcaagtgtgggcaatttggccattacctgggaacttaaaatgcagattctcaggcccttatcccagacttactgaatcaaactctggagttggagcccagcaatctgttttatcaagccttctgggtgattttgatatatgataaagtttgagaaatacttgtctagtatgaaaatgggatgcagaggttgtaatcaatgagtttatatatctggtaccactgacaaaaccatctctagaatgaaaaatgcatcaggcattagcttgattccattaaatagttgattcaccaaacagctcttcttcaagcaactttctgtttataattttagtataatatgaggttataccaaatatacaaatatgggcttctgatatgtcccttccctgtgatggtaatttttcgtggtaaattagtagaacatctttggattacagttcagctccccatatggcttgtctaaaaggagagaaagcaagtattccagaatatcccatggtaaattagatatgtactatagtgtgtccacatggaccccacatattttaataagcataagtctattggagccttcattcctggacattgacctaggtaatccctggtatgtgccctttgaaaaatcaaaggccaactgaggccttaattagttctgccccaacacttacacttttgtccctctttctaccctcatttctacttttatgtgtgagagatttaaagaaagcaagattttctttgtatattattgctaatgtccctatccagcatttttatagtatttattgatttttttctaattataaaagcaatacacttagattgtatttattgattttttctaattataaaagcaatacacttagaaaatatcttaaatatataaagaaaataaaaatcgcccttaacactaccaccctgagaaaatactttttaaaaataagattatatactttcctaactatcctcttctctttccccattcctcccatcaaaaactaaattagtccccctgttatattttctcatggcactatgcatttccaaaatagaatttgccagaattgcagttaaattttttgtgtgattattttaatgtctgtctcttacactagactgtaagtctagtgactaggtagggaccttgtctgtttgtccatcaatcacactatccccacctagcatttagcagctgcacaactaataactgatgaataaataaatatgttcgcatattaaattgggatatggtttgctgtgatggagctgaaagaaatgtaatactatatcatcatccttcccaataaatgtgaaaagaaagataaactgcaaaagataccacatatgaaattgttcccaagtgtatcatcatatcttcctaattttagtatttacttattcctgatgtttcattcaattattcatcagacatgcatccactatactgcaagtcaagcagtagagagagacagagaaataaaacaaagtataaaaacacccccagagcctaggtaaataaataaataaatacaaaaataaactaggtggcaagtatgaaggaaatattatgaaaacaccaaaggaaattaattaacagtaactgtctgaaacgatcttattctattattgtccaacagacaataaatgggaagcctttttgccattttctggggttcaccaggtgaaatacaaatagtaaaaatactaatgatccctttcattacagttctcaaatttgctgtttttatagatttttagacttacttatttgatccactagagggcagtaaacccttaaataaagacaatgtaaccaaccttcctttaaaagtatagtaataagtgctggcacaattaatttagaaatgaacccaaaatttcctgcttatttaagtttttcatttattagtgagttgtctgcccaattagcaattttttttaggacagacagtatcttattttcacttagcccagtgtacgagtcatgttacaagtttattacatttcctaaagtttgaataacaattgtgtaaagaacatgatttgatgaatgcccatattgttgtggtacagtataaaattctgttttagagccctaaagaaaatagtctctgctcacaatatgaacagaagtaaaaaaattagaagtgaggataagatgtaagtaatgattaaaataagtatgaaataaggtactatatatgaaactaggctgtgtacttcgtatacaaatagaagataattttatgatttggtaaaattgtgttttatatttaacgctatgtgacaaaattgtggcttgggaagaggaaatgcaaatcatgaagattaatatctgaagttcagattgacaatttctgagcttggcactgaagatataaacagatagtccttctacgatcttactttgagtccaggaaaaacaagccatattgaacagataaatttaatataatgtggcatgtgatgaattaaagagtaatttaacttctgggaaaacgtcctagaaaagaagacttctaagaaggatcttaaagaataataagcattaccaagagaatgaaagcattttagagagaagaatggaaaaaagcaaaggcatagaaatgtgaaacatattgtgggggtggggaagcaaggaacacaactcagattgtttctcttggcataaattactagcacataaagagcaaaaagaaagttaagagaataggcattagggagaataaaaccaaatagacaatacactacaatagacaaaacaaatggtaggactacagaggtacaatagtatatggtgtagaaaaaaagaaaagccattccctttgttaataaagaaagactttttaggggaacttcaaatgaaataggaagaaaattctggttatcgtatggcgtctgcctactctgttgtaaaaattttcttgaattgcaaaattctgcttatagttcttcattcatgcaataaattttgttttgagactagtctttgttgcccaggctggagtgcagtggcgcaataccgcgcactgcagcctcaatctcccagactcaagtgaccttcccacctcagcctcctgagtagctggaactacaagcatgcaccaccatgcccagctaatattttttattatttgtagagatgagttcttgctgtgttgcccatgctggtctcaaactggtgggctcaagcaatcctcccaccttggcctcccaaagtgctgggattataggcctgatccaccacacctggccccattcaataaatatttattgtgaacttactgtgtactgagcactgttctaagcactggggttacagtagagaacagggtggactaggtccccgtctttatgaaacttaggctagtgatgggtagatgaacaaaaataagtaagcaaagacatacataggatgactatccagcagggttagtaccatgaaggataaaacaggtgatgccatagaaactaagaggaaggaggattctacttgagctaaagtggggctctctgaagggataacattagagttacagattgaaggacaataaagaaccgactattccaagacctaagggaagaatatcgtagccaaagagaatagtaagcacaaaagcctgagaagggaaatcgtttggtgtgcttgaggagcagaaagaaggccagcatggcttgaaatacagtgattgaggaggagagtggtacaaagtgaggtcagggattggcaagatctacatgacccagggctgcacagaccattgtgagatattgaggcttcattctaaatagcaggattttaagcaggtaagagacagcatgttcaggagtgagctttatgctcttttagctcccctaactcacaggtagatgtacctccatactaaaccctacactaaattggattttagaatgtggaggacaatgcctttgttgacataacatcatttgttatgttaactaaaagttataggaggcctttgttttggactaagctcctgcactaggccccagtggaccagactaaaaatcaaaatagagtcatttatacttaaagttccacctcaccaaatcaaaactacattgttatctgaccttcctagaactcagaagagagaaataaccaaatttcccacatgtgccagtttcaattgtcataacaacgaacttcgctctgcctttgatgcttacaacaaaaagtagccttatgttaaccagttattcctgtatttttctgttcctctgttcccactttaggaggaaagtaactttgaaatgaccaagctgctttttgttctttgtttctactttctttagcccttctctttctgtaaaactgaacttctctgctcagccccttgggtcacttactctattttatggaataaagtatttcccgattctagaattgttacaggaaagtagtcccaattcagacccccagagaggcttctttgatctcgcacaagaaagaattcagggcaagtccataaagtgagagcaagtttattagggaagtaaaggaataaaagacatagaacagccccgagggctgctggctgcccatttttatggttatttcttgatgatgtgctaaacaaggggtggattatttgtgcctcccccttttagaccatatagggtaacttcctgacgttgccatggcatttgtaaactgtcatggcgctggtggcagtgtagcagtgaggacaaccagaggtcactctcatcaccatcttagttttggtgggttttagcaggcttctttactgcaacctgttttatcagcgaggcctttataacctgtattttgtgccgacctcatatcttatcctatgacttagaatgccttaaccgtctgggaattcagcccagtatgtctcagcttcattttacccagcctctagacaagatggagttgcttttttattcaaacacatctgacagaatcataaataaagccaattaagatctttcacaaaattgttgtaattttgtcttttgacagttgcaatggcaaggaatttgaggttttagcacttacaatggcaattttctttgacccttctttctgcctttcctttgtatcctgtattacctaccctaccatgtcctttgagattgccatgtagcctaaggtgacaaccaaatctaggaatacataatcggctttggcagaaccttactaatgtatatataagagtcccaacaaggatagcaaaaaattaggattagcgttctcttttctgtgctcccttcagtaatacagattagtgatttatttaaattatttatctttcatctgtaaatttccatcttattaccttgagtggcaagattttatttttatagaaatgttattttgattgactatcagaattagtatcactttaacatctcccttccatagtcaccacatttctatgtttgtcatcatctttagagtactataccgaaaagattttattattttaaaaccagtgacctccactttgtcagtttgctgatgccagtgtcaaaaacagcatcacccatttcagaattgaaagtttttgccatgtgtttaaaaatgaaagtttcttaatacagctttatctcaaacagttacaaagacctttgttgtaaggcatgtattttatgttatatgttttatgttatgctaatccatttaaaaaattagtaaacaaaccaacctttttttttttttttttttgagacagagtttcactctgtggcccaggctggagtgcagtggcatgatctcggctcactgcaacctccgcctcccaggttcaagcaattctgcctcagtatcctgagtagctgggattacaggtgcacaccaggctaattttgtatatttttgatagagatggggtttcaccattttggtgagactgatctcaaactcttgacctcagatgatgtgcctacctcggcctcccaaagtgctgggattataggcgtgagctaccacaccctgccacagatcaagcttttaattttttctctctctctctctttttttttttttttttttttttttttgagaacaagtctcactctttcacccaggctggagtgcagtgccatgaatacagctcacttcagtctttacctcctgggctcaggtgatcctcccacctcagcctcccaagtagctgggaccacaagctcatactaccacgcctgactaattttttttgttttttggagagatgaggtctcaccgtgttgcccaggctgaatttttaaaaagaaagtataaagaggagaacattgctacaggcataccttggagatattgtgggttgtgtttctgaccactgcaataaagcaaatattgcagtaaagcaagtcacacaaattttttggtttcccagtgcatatattaataaaatgtttacactatactgtagtctaagtatgcaatagcattatgtctaaaaaatacatcttaattaaaaaacactttattattaaaaaatgttaatgatcatctgagccttcaatgagtcataattttttgtggtggagggtcttgcctcagtgttgatggttgctgactgcttggggtggtggttgctgaaggttggggttgcagtggcaatttcttaaaataagacaacattgaagtttgctgcattgattattcctttcacaaaagatttttctgtaccatgtaatgctgtttgatagcgttttactcacagtagaacttctttcagaattggagtcaatcttctcaaaccctgccactgcttatcaactaagcttatggaatattctaaattctttgttgtaatttcaacaatgttcacagcatcctcaccaggagtagattccgtatcaagaaactactctctttgtttatccataaaaagcaactcgtcataagttcatgccttatcatgagattgcagcaattgagtcacatcttcaggctccactttttaattctagatctcttgctattccaccacatctgcagtcacttcctccactgaaggcttgaacccctcaaagtcatccatgaggactggaatcagcttcttccaaactccaattagtgtggatattttgacttcctcccataaatcatgaatgttcttattagcttctagcatggtgaaaccttttcagaagattttcaacttactttgcccagatccatcagaataagcattatctatggcagctatggccttaggaaatgtgtttctgaaataataagacttgaaagtcaaagtgactcattgatccatgagtagagaatggatgtgttaacaggtatgaaaacaatatcaatctccttgtgcatctcatcagagctcttgggtgaccaggtgcgttgtcaatgagcattaatatgttgaaaggaatctttttttctgagcagtaggtctcaacagtgggcttaaaatattcagtaaatcatgccataaacagatgtgctgtcatccaggctttcttcttccatttctagagcacaagcagagtagattcagcataatccttaagggccacaggatttttggaatggcaaatgagcactggtgtcagtatcaagacaccagctgcattcacccctaacaagagagttagcctgttctttgaagccttgaagccaggcactgacttctctagctatgaaagtcctagatgtcattttcctcccatataagtctgttgtgtctacatttaaaatctgttgtttagtgtagccaccatcatcaactagttaagatctacttatcttaactagatcttttggataactttctgcagcttctacatcagcgcttgctgctttaccttgcagcaagttatgttttatgttttggaggtggcttcttttcctaaacttcaagaaccagcctctgctagcttcaagcatttttttctgcagcttcctcaactctctcagccttcatagaattgaagagcattagggtattactctggattaggcttcgatttaagggaatgttgtggctcgtttgatcttctatccagaccactaaaattttctccatatcaacaaaaaggctgttttacattcttacttatgtgttcactggagtagcacttttaatttccttcaataacatttcctttacattcacaacttggctatttagcacaagaaacctaacttttggtctgtctcggctatcaacatgctttcctcactaaccttaatttttgtttctgtcttttattttaaagtgagagatatgtgactcttcctttcacctgaacacctagaggtcattgtagggttaataactggcctaatttcaatattgttgtgtctcagaatagggagacccaacaagagggagagagatggtggggcagtcagacacacatttatagattaaattcatcttatataggtacagtttgtggcaccccaaaacaattacaatagtaacatcaaacatcactgatcacaagtcaccatcagatataataaaaatgaaaacttttgaaatattgtgagaattaccaaaatgtgagatggaaggtgagcacatgccactgaaaaagtggacttgcttgagacagggttgctataaaccttcaatttgtaaaaaaaatgtaatatctgtgaagcataataaagtgaagcataataaaatgaggtgtgtctgtattttattatttgacttctctgattttgtttatttggagatagggtcttgctctgtcacccaggctggagtgccatggcatcatcatagctcactatggccttgatcctcctgccttagcctcccaagcagctggtattacaggtacgtgccaccacactcagctaattctcttatatttttgtagagacagtgtctccctgtgtttcccaggctggtcttgaactcctgggctcaagcaatccccccacctcagtctctgaaagtgctgagattacagacataagccaccacacttggccttcctgatgtgttttatacaaggatattaaaacactttgagctatcatttgacatgtaacattttgctttttctgtttacaaaatctgaagtcttttttttctcttcaagatgtatcaaatgagcacactgaaatctaataaagtgatatttcagctaaaaaagaacaatttccaccaatttaggttctttaaaagattcatgtaagttcatgtacacattgaatataccttatctgaaatgtttgggtccagaagtcttgtgaattttggatttttgaatatttgcacataattaatgagatgcaggaatgggacccaagtctaaacataaaatttgtttatgttttatatacatcttatacacatagtctgaaggtaattttatacaatacttttttttttcttttttagatggagttttgctcttgttgcccaggctgaagtgccatggtgcaatctcggctcactgcaacctccgcatcctaggttcaagcaattctcctgccgcagcctcctgagtagctgggattacaggcaccccccaccatgctcagctactttttgtatttagtggagatggggtttcaccatgttggccaggctggtctcaaactccctacctcaggtgatccgcctgcctcggcctcccaaagtgctgggattacaggcatgagccaccacgcccggccacaatacttttaataatttagtgcatgaaacaaagtttgtgttaagtacttatgtgtggaattttgatttgtgccatcatggtggcactcaaaacatttcagattttgggttttggactttcagattcaagatgctcaaccggtagtttcctttgtattgatggcagacacaagttgtgtatcttcttgtaaaggtgtgaagaagctaaatgacatctttcctgaattactgggatagagcatttattaagaaacaggatacaagaattttcttaaactactctgttttaaatgtgattttcttcctattaatattttaaggagaaaaagaattaattttccaatacattgataccaccttcactttgaaagtgaaacaaatgacatctattagctttgcagtagaggttaagtggttttcctaagaaaagaatatgcactgcaatgaaagatttgccagtcatcccaatggctattttgttttgcagaccacggtgtgaacacatgaacagaagacgaaaatttcttctagcctcagtacttgctctccagaattcaagttttatatatccatcatgtcagaagtgcttctctaggataatcctggtctccaaaaggtaaaagtaaagtctgtaagtgtgagagaggaaatacaaatgcacactgtagatttcctatggctcaagggcaaggaccagatttaccaaacaaggacattagattctctcaggggttggttcttctgtaaatcccagaacagatttcactgctaatcctctattactagagaaaagttttaagttactgtcaagtcctttgctaaatacttgcctcattgaagaaaaataacttctcagagagtaagttccaatactgggtacaaaacttagcccatttctgggatatccctgggaataatataggagacttgtgtttattctttgtttatttttgcatgatcagtagaatagttgttaatataaataaataaattccttgagaccagggactatgttatagtaatttctatcctttagcaactagaaaggtgtttggcgtataattctttatcatggtgctcagatgcaagccaactatacctgagagcctaaggtcttcctctgatctttatagagtagaaacgagaggttaggtttgaagtttctccagaacactgtctctctgcatcgaagagaggacaagaatacctagtaagtaactagaactatgtaagaaagagtagtgtgccagcaatattcttaactagtctttttgtctagttagcattgaatggggaggcagaaaaggattggcagttctaactcatatctagactctaagtaatccttgaagtagttatcacactgttcctttattaagccactctctcaagcactcatttgttagctctaagagaaagaccctgtttgtgttattcatcattaaatccttggctagggcttagttcatagaaagtgttcaacaaatgttggttaaatgaatgaataagtgatagcatgatagtgtttagattgtcttaggttcaccccttttcaggttcttgcctgtcatctgaaacaactaaaacccatgggctatttgcctttcatcaaaatctgtacttagaagcagtgtggtatacagtccttacttaatgttgttggattcttagacaccgcaactttacgcaaaatgatgtataatgaaacaaatttttttctcatcaacgttataatgatgttgtttgagaatctgctataagtagttttgcttaaagtcacagtatccaagaacctatcactaacattaaatgaggacttactgtaatggaacaatttcaagcttcagagaacacaacagagtttcatgtaggctctggctctcattaactatgtgacctagggcaagatagttaacttctgtgagtctaattactcatttgtaaggtgggatcatggtacccacaatatgggatcattgtaaagttagagataatgcacagaaatgttctagtagaatacataacatatattaggatttccaaagtggtagctattattattataatctattataagtatactttaccttattgcagtatgttatcatgattaaaagcataattctctggagctgactgcctggattcaaattgcaaccctgccattatagctgtgtggccttgggcaagtcactttaattatctgagcctcaaaatggggaaagtaatatctgcctaataaggttcttgtaaggatcaaataggttaatatacataacatgcctagaacattgtctgatacattatcagtaatatatagatataaaatatttttaaaactctttctttccagtcatttattttaaagataatctgcaacaaaaatttaggttgaacaataatgccattgttacttatttagacgggtaataccagtagataacattagtgagtgtttgctgtacagtaggcactgtgctaggaactttgtgggcattatatcttttaatacaatagccctatgaagtgaatgctattgttaatgccaacctttaaaggagacaactgaagcttgggaaagttaagtaacttaccgcaaatcatcacacagccagctagttaggggcagaaacatattcaagcctaaacaatctgaattctgtctaccttcatagtcaccatattacttccaaattagcagcgaagtttgtattcagaatgacatcttcccctctctttcttagaacttaaagtgacctcggaaaggacttgtgactggacccttttggaatataaaacccatggcacatagtccttgcctatggaaacatagtccatggaaatataacctgttttctgcatatactacattgacacaaaaattttttaaaactatttccataatttctggtgcttacctttttttcccataggttattggggtacaggtggtatttggctacatgagtaagttcttcagtggtgctttgtgagattttgctgcacccatcacccgagcagtatacactgcaccctatttgtagtcttttatctctcaccccctcccacccttccccccaagtccccaaagtccattgtatcattcttatgcttttgcatcctcatagcttagctcccacatatcactgagaacatatggtgtttgattttccattcctgagttacttcacttagaataacagtctccagtctcatccaggagactgcaatgccattaattcattcctttttatggctgagtagtagttcatcgtgtatatataccacagtttctttatccactcattgattgatggacatttgggttggttccacgattttgcaattgtgaactgggctgctataaacatgagtgtgcaagtatcttttgcatataatgacttattttcctctgagtagatacccagcagtgggattgctggatcaaatagtagttctacttttagttctttaaggaatctccacactgttttccatagtggctgtactagttcacatttctaccagcaatgtagaagtgttctctgattgctgcatccacaccaacatctactggtttttgattttttgattatggccattcttgcaggaagaaggtagtatcgcattgtgattttgatttgtatttccctggtcattagtgatgttgagcattttttcatgtgttttcttggccatttgagaattgtctatttatgtccttagcctactgtttgatgggattgcttgtttttttcttactgatttgtttgagttcgttgtagattctggatgttagtcctttgtcagatgtatagattgtgaagattttcttccactctgtgggttgtctgttcactctgctgactgttctttggccatgcaaaagctctttagtttaattaagtcccagctatttgtttttattgcatttgcttttgggtacgccaatgtctagaagggtttttccaatgttatcttctagaatttttatagtttcaggtcttagatttaagtccttaatccatcttgagttgcttttatataagattcattctcctacatgtggctagccaatgatcccagcaccatttgttgaaaagggtgtcctttccccactattgttcactttgtcaaagatcagttggctgtaagtatttgagtttatttctgggttctctattctgttccattggcctatgtgcctatttttataccagtaccatggtgttttggtgacgatggccttatagtacagtttgaaatcaggtaatgcgatgcctccaggtttgttctttttgcttagtcttgctttggctgtgcaggccatgttttggttccatatgcattttaaaattgttttttctaattctgtgaagaatgatggtggtagggattgcactgaatttgtagattgcttttggcagcatggtcattttcacaatattgattctacctatccacgagcatgggatgtgtttccattcattgtgttgtctatgatttctttcagcaatgttttgtagtttttcttgtagaggtcttttgcctccttggttaggtatcttcctaaatttgttttttttgtgtggtttttttttgtgtgtgtgtttttgtagctgttgtaaaaggagttaaattcttgatttgactctccacttggttgctgttagtgtatagaagagctactgatttgtgtacattaatcttgtatccagaaacttggctgaattcttttatcagttctagcagctttctggaggagtctttagggttttcgaggtaaacaatcatattgtcagcaaacagtgacagtttgacttcctctttactgatttagatgccctttctttctttctcttgtctgattgcattgtctaggacttccagtagtatgttgaagaagaatggtgagagtgggcatccttgtcttgttccaattctcagagggaatgctttcaacttttctccattcattgttatgttggctgtgggtttgtcatagatggcttttattacattgaggtatgtcccttgtatgccactttcgctgagagttttaatcataaatggatgctggattttgttgaatgttttttctgcatccattgagatgatcatgtgatttttggttttaaaattctgtttatgtggtatatcacacttattgacttatgtatgttaaactgtccctacatccctggtatgaaacccacttaatcatggtggattatctttttgatatgttgttggattcagttagctagtattttgttaaggattttagcatctatgttcatcaaggatatcgggcagtagttttcttttttgcttatgtcctttcctgatttgggtattagggtgatgtcgccttcatagaatgaattagggagggttccctctttatctcatagaatagcgtcagaaggattggtaccaattcttctttgaatgtctggtagaattctgctgtgaatccatctggtcccagactttttttcgttggttttttttgagacggagtctcactctgtcgcccaggctggagtgcagtggcgtgatctcagcgcactgcaagctctacctctcttcacgccattctgcctcagcctcctgagtagctgggactactggtgcccaccaccatgcccagctaatcttttgtatttttagtagacagggtttcacggtgttagccaggatggtctcgatctcctaacctcatgatccgcccacctcagcctcccaaagcgctgggattacaggcgtgaggcaccacgcccggccttttgttggtaattttttaattcccatttcaatcttgctgcttattattggtctgttcagggtatctaattcttcctgatttaagctaggagggttgtatttttccaggaatttatccatctcttctaggttttctagcttgtgtaaaggtgtttgtagtagtcttgaatgatcttttgtgtctcagtggtgtcagttgtaatatgtcccgttttgtttcttaatgaggttatttggattttctctcttcttggttaatcttgctaacggtctatcaattttatttatcttttcaaagagccagcttttggtttcatgtatcttttgtatttgtttttgtttcaattacatttagttctgctttgatcttggttatttcctttcttctgctgggtttcggtttggtttgttcttgtttctctagttccttgaggtgtgaccttagaatgtcagtttgtgttctttcagtctttttgatgtaggcatttaggactatgacctttccttttagcactgcctttgctgcagcccagaggttttgataggttgtgtcattattgccattcagtttgaagaatttttaaatttccatcttgatttcatttttgatccaaggatcattcaggagcagcttatttaatttccatgtattggcatggttttgaaggttccttttggagttgatttccagtttattccactatggcctgagagagtgcttgatatgatttcaattttcttaaatttattaaggcttgttttctggcttatcacatggtctatcttggagaaagttccatgtgctgttgaatagaatgtgtaatctgcggttgttggatgaaatgctctgtatattatctgttaagttcatttgttccaaggcatagtttaaatccattttttctttgttgactttctgtcttgatgacctgtctagtgctgtcagtgtagtattgaagtcctccactattattgtgttgctgtctatctcatttcttaggtctattagtaattgttttataaatttgggagctccagtgttaggtgcataaatgtttaggattgtgatatttctcgttggacaaggccttttatcattatataatgtcctttgtctcttttaactgcttttgctttaaagtttgtttttgtctaatataaaaatagctacccctgcttggtgtccatttgcacaaactgcctttttccactcctttacttgatgtttatgtgagtccttatgtgttaggtgagtctcctgaaggcagcagatggttggtgagttcttatccattctgctattctgtatcttttaagtggaacatttatgccatttacattcgatgttagtattgagatttgaggtaccattgcattcattgtggtatttgttgcctgtgtaccttgttttttttgtttttgctttttaaattgtttttgttttataggtccttcatgatttatgcttttaagagattctgtttttgatgtgtttccaggatttgtttcaagatttagagctccttttcacagtttttttctttctttcttttttttttttttttttttttttgagacggagtttcgctttttcgcccaggctggagtgaagtggtgcaatctcgtctcactgcaccctccgcccccccaggttcaagcaattctcctgcctcagcctcccgagtagctgggattacaggcacccaccaccacgtccagctaatttttgtatttttagtagagacagggtttcaccatgttggccaggctagtctcaaactcctgacctcaggtgatccacccgcctcagcctcccaaagggctaggattacaggcatgagccactgcgcccagcctagcagttcttgtaatggtggtttggtagtagcagattctctcagcatttgtttgtctgagaaagactgtatctttccttcatatatgatgtttagtttcactgggtacaaaattcttggctgataattgctttgcatgaggaggcttaagatagggccctaatcccttctagcttgtagggtttctgcaaagaaatctgctgttaatcggataggttttcctttatagattacctggtgcttctgtctcacaactcttaagattctttcctttgtcttaactttagataacctgatgacagtgtgcctaggtgatgatctttttgtgatgaatttcccagatgctctttatgcttcttgtatttagatgcctaggtctctagcaaggccggggaaggtttcctcaattattcacccaaatatgttttccaaacttttagatttctcttattcctcaggaacaccgattattcttaggtttggctgtttaacataatcccagactttttggatgcttggttcataatttcttattcttttttctttgtgtttgttggattgggttaatttgaagaccttgtcttcaagctgtgaatttctttcttctatttgttcatttctattgctgggactttccagagcattttgcatttttgtaagtgtgtccagtgtttcctgaagttttgattgtttttctttatgctatttccttgaatgtttctcccttcacttctcgtattgttttttggatttccttgcgtcaggcttcgcttttctctggtgcctcgctgaattctttttcaggtaaatcagggatttcttattggtttgaatccattgctggtgagctagtgtgattttttttggaggtgttaaagagccttgttttgtcatattaccagagttggttttctggttccttcttatttgggtaggctctgtcagagaggcaaggtctagggctgaaggctgttgttcagattcttttgtcccacaggatgttcccttgatgtgatactctccccccttttcctatggatgtagcttcctatgagccgagctgcagtgattgttatctctcttctgggtctagccatccagccagtctgtctggctccggggtggtattcagggtttgtctgcacagagtcctgtgatgtgaatcgtttatgggtgtctcggccctgaataccacacagtatttggggtgtctcccaggtcctgcaggagcagtccacttccttcagagggtctgtgggtcctcttgggattcctggtttgttcttgcagttgttctggagctaaaattcatagtgcgagccccaacatgctgctttgtccgagttggagctgcaatctaatcctgcctcccatccgccatgatgatctaaatcctggtgcttatcttttctactgttgtttttgctttccctttttcttacttggaatcagttgtaagccaacacaggaaacagaaattcctcatgttcatttccccattgctatagcactgcaagcttatgacagaggagttccatgctcttgcctttgcagaagatcttagagatgctgaagaacagagagacgtccctaaatattttctttgaacctgaaatttttagtgactataatcataataagtattttgtgctttatggaattaactttcttacctccaagatcagatcagtagattgaatgtagttttcaatctataggtattctgcagagccttggggctccatggaagtgcttatggagggagatgggattagagtagtaatagtacctagtgctgagtagtaggtaagactctagggcccccacgttagtttcaacaagatctctattctcatccttatattagtgttccaagttaaatttcatttgaaagggggtttcattatgtaaatatacaaacatagacatacatctataaaaaaaaatgtgtacaaagttagttcggtccttcatatgaagcagtaactacacatacacacacaatagtgtatgtctgtactctccccagattataagctggagaagggatttatttatccagacaagctatctacatagaaattgcccttctgggtgactaatgggacccataattccttttagcctagaaatccatttctaacactaataactttcttttcctatcttaaaataggactcatcgctcagaggctacctatcctctcccccattcccaactacccaaaaagtttatatcatttacttaagcaagtcaaatttaatttcacacatatagatcatagttttcttactttgtgggggaagtgatatgtggaagcattaagagatatgttttttaaaatatgtctcattactttgtgtgtatttaatctgggtctataaacttggaaagggatgttatataatcatatagtcaggatattcttaagctggaatctgtggatacattataggtatgtatgactcctccagtccctaagatatgtagaatatcgtgttcatatctgttttttgtggggagagagtgagtccattgctttcatcagattttttaaggttttcaagactaagaaaacattaaggattacttatctcaccagttcttctacatctgggctaaatataagtacgctagaaaaataaacaaatgaggctgggcatagtagctcatgcctgcaatcccagcatttgggaggccaagatgggaggattgcttgagtccaggattttgagaccagcctgggcaacatggtgaaacctatcctctaccaaaaataaacaaaattaggcaggcatcgtggcatgtgcctgtagtcccagctgctcaggagtctgaggtgggaggatcgcttgagcctgagcggtcaaggcttcagtgagccaagatcataccgttgcactccagcctgggcaacaaagcaagaccttgtctcaaaaaaataaatgaataaaaataaaaaaaaaacaaatgaaacttggtatttttttaactgggatcaaacaaaaaagatagcaaattacagctattatttcagatagatcctttcagaggctccttgaactcaaatctattttcataattctaaggcattatttgccttttcactttcagtctctcatgagtgcataatggagtttcccagaggctacataacacgtactatcacaacagattgagcagagaagcagatatgagaatccagctgtctttttatgaaaccagacattaaagagatttgcaaaatgtaaaacaatgctggtctcttcttactaatttttaaaatttgaaaaacataactatttttcataaaagtatgttttttgtgttaaccatgtaaagggtctgtttttaatgaattaatatttttttgatttctcagttttaatttctcactttcatttaatttctcgttttatgagaaatgtagatagaagccaggtgtgatggctcacgcctgtaatcccaacactctgggaggccgaaacaagagaatcacttaagcctaagagttcaagcctagtcagggcaacacagtgagacccccatctctacaaaaaaatttaaaattagccacatatggtggcatgtgcctgtggtcccagctactcagaaggctgaggcaggaggatctcttgagcccaggagtttgaagttacagtaagctatgatagcaccactgtcctccagcctgggcagcagaatgagaccctgtctgaaaacaaaccaaaaaagaaatatagacagatataagataaacaagttctatggatctaatgtacagcttgagtggtaatggatgatgtgttaaataattcgactatggtagccaggtgcggtggctcacacctgtaatcccagcactttgggaggccgaggtgggcggatcatgaggtcaggagatcgagaccatcctggctaacacggtgaaaccctgcctctactaaaaatacaaaaaattagctgggtgtggtggcgggcacctgtagtcccagctaatcgggaggctgaggcaggagaatcgcctgaacccaagaggtggaggttgcagtgagccaagattgcaccactgcactccagcctggccaatagcgagacactgtctcaaaaaaaaaaaaaaattttgactatggtaatcattatacagtgtagacgtatttcaaatcaccatgttgtataccttgaatatattcaatctttggcaagtaatttttttttttttttttgagacagggtctggctctgtcacctccagactggagttcaatggcacaatctcagctcaccacaacctctgccgcctgagctcaagcaatcctcccatctcagcttcctaagtagctgggactacaggcgcatgccaccacgttcgttaatttttgtattttttgtagagacacagttttgccatgtttcccaggctggactcgaactcctgagcttgagtggtctgcccgccacagcctcccaaagtgctgggattacaggtgtgagccatcacgcctggcccaagtaaatatttttgaataaaaaaaatagatactattcacataaacaaaactctttgatattctcaataattttttaagagtattaaaggagtgtgaaaccaaaaagtttgaaaactgctattctgtaacaaatgacattttagaaatatgggtgcctctagaagttaaatcgggacggtgatgtgaatatgttgtctatatccttgtttctcaaagtatggcctaaggtacatctgcatcagtattacctgggagcttattaaaaatgcaggatcttgggcctcatcccagacttcctgaatcagaatcttcattttaacaagatctctggatgatttgtatacatattaatgtttgagaagctctaatctgtattacaccacactaacatttattttaatccagcatcgttcctaaaaggattaaagaaaactatataaataaatatcttcattatacatatgtactttataaaaatatatatagtttaatatgtaaatgcatgaacactaatagacatagttttttgaggctattattgatactgtcattgcaagcagttctttattttaaccatttggtcccactgttatcatatcataatatcagaacttcatgatacgagttcacagtcttgggtttgggtcatatatttaccaactttgtcatctcagataaaaattcaaactaatttccccatttgtaaattttacctataaaaatgaaataatgtatgttgaaaacatttgtaaactgaatgctaatgcatattagtctaagttttgctaggaattttacattaaacctgtatgcattattgcatagcctttaaagaaattccaatatatattttaaacagttcatttccctagagtttggtactaatggagttttatcccctagtgagtcaattacctttaattcattctatggctaacctacagcacaaactctagcagatttgtataggattatatgaatgggttggtatagatctatcctcagtatggcagaagaataacagcacagatctaataaaggtgagtcactttcagagctacagattttagactccccctagtggccatctggcaacaatcaaatttatacaaccatctttcaccttgctttctgtttgccttttgccactcttttttaagatctttagcaatctgaagaaaaaacaaaattctagtattagccattaccataaaatgtttttaggtgcttgttgtatttcaaaaaaattttttaaactattctgtctgttaaataaagttaacctaactgaggggtggacattaagaacctgaaagatagaaatcagagttataatacattgcaaactagaagagaagttaacagtacaagtgacagtaattatcacaatacttgatataattatgagggagaagcagactaacactaatttcacagtatttgcactagaccctttatttgtctattttaatccttcttcagccctggacttcatagatgaggaactcaagaatttagtaactgtcagacaatgagtacatggcaatagagttacactgccatgtagatgtgtactttttgactagaaagcctttagccaccattacatactgtcttaaaaaaacaagttaaattgcatggttttcatatcaaattttataatctgataagttatcaacatagtctaatgaattaaagaaagtaattttcattatggtgagaaaaatgcaattaagtgctttgtgtataaataggtattaaatattttgagattattttttgtcctctttttttttttttttttttttttttttttttttttttttgagacggaatgtcactctgccccccaggctgtagtgcagtggtgcgatcttggctgactgcaagatccacctcccgggttcacatcattctgctgcctcagcctcccaagtagctgggattacaggtgcccatcaccacacccatctaatttttatgtatttttagtagagacagggttttaccgtgttagctaggatggtctcaatctcctgacctggtgacccacccgcctcggcctcccaaagtgctgggattacaggtgtgaaccaccgcgcccggccttttcgtcctctctttcatgcacagttctcctttagttttccatcaatttggtatgtatttctatcaacttggggctgtttaatttaaatcagtaacgctaactattctgactagagaaatttaaaataagttgatctgaaagagtttaagaagaatttgagttgtgtaggagcatttatacacaaaatgttattttaaatttttactgttctggatttttcatcatatgaaaaacatttaatgaacatctccacacttttttccaccacttttctaggtctaattgtccaaaatgtggctctactggtgaatctggaaatgccaattacagatacaaactttccttaaaagttgcagaatcaaacaaattgtttgttattactgtatttggaagttgcttagatacattttttggtcttactgccactggtttgcacaggtaagaatacttaaaacatcctttttcctgactgcccttagaatttgaagatacaagtttataaggcaatatgcatttttgtagaaagataatcattcaaccccagattgtcaattcctttaaaagacaagcaagtaagaaagatgtttatttcctgaatacatattatgatgatattaaaacagtctccttttatttagggtaattaatctgtaattagaatattaagttataaatctctaatccaagttacagaaatagaggctaagaaagtaacatcatttcaaattgaagaattatccaaattgaggttagcattgaaacagttaggttcccctgaggcagaagaatctatttgagggaatatttgcatttcagaaattgaaattttattttttatctgtattgcaatttaatttgcatagtttgaccttttacgacattgtcctgagaatataagaataagcaattaaagcttttcttggccgggcgcggtagctcacgcctgtaatcccagcgctttgggaggccgaggcgggcggatcacaaggtcaggagatggagaccatcctggctaacacggtgaaaccccatctctactaaaaatacaaaaaattagctgggcatggtggtgggcgcctgtagtcccagctacgccgggaggctgaggcaggagaatggcatgaacccaggaggcagagcttgtagtgagccaagattgcaccactgcactccagcctgggagacagagcgagactctgtctcaaaaaaaaaaaaaaaagcttttcttccccctcagtcttctgccctcctcccctaatcacatgcaagaaatctatgtccacatttttgtgcttgagacaataaagggaccacaaccaggcttatcagagaaaagggatgactttttcctgctttcaagtgaagagctagagatgccaccactattcccactgccacttttatttttccttataatcattgccgggcctgatggttaggcaggtaactactttactcccacttgatcaattggttttgttgatttttctgtgctatgagaaactagagagaacaaactgcctggctcttaaagtcactttttttcctctataaaaggttcatgctgcattttcaaattaattgtgtctctgactttatggcaagtaaaatttcaaagttcattgcttcacattttttactttttttccaatcaaggtacattcaggatcctaataaaattccagaaacactggacaatgatacaactcagaatctattaactaaagcagttgaaacttgctttgttggacaaagctttatttttggagtgacggtaattgagactagctttctttttaataatctgttaacatttccattgtaatgaattatgtgaattttctaaatagttgttaggagttctgtacatgtgaaggcctgtagaaacactttaaactatgtaaaaatagcctataggtggtctgttaaaacaccatgtgtgacaacttcctctttcgaaagtcaggggagcctacttcaaatgctttcagagcttaaaaatataaatttattatatatttagaaatgttagatatttgtttttggtatttagtatttattttgccctccggattttgttcaaattctatagtaaaacttccaccaattctctagctttttaattctgtcttctataaaagagaataatggaacactgaaggcaaagtatcttgagtattgataagaatactaaaactagattaagaaagatggtcttaaatataaaagtgactgtagaagaagttaaaaaaaaaagaagttactcctttgactttgaaggagtaatagttttctgtctcatctatgctaaagggaacaaagagacatttttttccacactggaatcagggttttaaaagaggactccacaacagaagagtgagaaaaatccaaagggaaggtagaatcaacggctacagagctttacttgttaaaatcgtagacagtccttttctctcctctcttctttttcctcctcccctttttcccctcccctcccctcctctctttccttagctaaagagaactatgatagttgccatttattgagccactgctattttctaagcactgtgcagttttccattttattactaaacagtaatcctgcatttttatttttatttttattttataaaggagaagactcaggttaaataaattgtccaaagtctcaacactattaataaatgcgggaactaggatttcttcaaatcagtttaaacaagctctttactctaaggtttatattctcttacatatgctactttgcctataaaactaacagaatcgaaattggaattgggggatggaggtaatagttgtatctgttttaaccttttaaatctgtttattttattttatttttgagacagaatctcactctgtcacccaggctggactgcagtaccaagatcatggctcactgcagccttgacctccctaggctctggtgatctcccaccccagcctcctgagtagctgagactacaggcacacgccaccatgcccagctaatttttgtgggggtattttttttagaggagaggttttaccatgttgcccagtctggtctcaaactcttgaggctcaagtgatctgcctgcctcggcctctcaaagtgctgggattacaggcatgagccactgtgcctggctaaatttctgtttcatgtttaagtaaatggaagacaattttattcttacttaaatttctttgcttctttcacagaattttgaaaaccaacctggacaaggttcagatgccagtaacttcttacagcaatgctctgaccacaaaagaaaagccaaagcactagtggcttgccagattgttctaccagacccaggtattgcaggctttactgtcattgactacttccatcaacttttgcagacttttaatttcaggaaacttcagtgtgactctcaggcacctaacaatcacttacttgctttagatcactcaaatagtgatctcagcagcatatatacttctgacagcacttctgattttttcaagtcctgcagcaaggatactttttcaaaattctggcagccatcacttgaattcacttgcattgtttcacaactaacagataatgatgatttttcagcttcagaacaaagtaaggcctttggtactcttcagcagaacagaaagtccatctccattgcagaggccactggttccagtagctgccatgatcccattcaggattcatggagccttgtttcatatatggataaaaagagtacagcagaaaagttgggtaaagaacttggcttacaagctaaggagctgagtgcagttcacagcagtcatcatgaaattggagttaatgactctaatttattctctttggaaatgcgagagccccttgagtcaagtaatacaaaatccttccacagtgcagtggaaattaaaaataggtcccagcatgagctaccatgttttcagcatcatggtatagataccccaactagccttcagaagagatctgcatgttgtccaccttcgttactcagacttgaagagacagccagcagttcccaggatggtgaccctcaaatttgggatgatctgccattctctgaaagcctgaacaagtttctggcagttcttgaaagtgagattgctgtaacccaggcagatgtcagtagtaggaaacatcatgtagataatgacattgataaatttcatgcagaccacagcaggttatctgtgactccccagagaactactggagccctgcatacaccacctatagctttaagatcatcacaagtaatagtcaaagcaaactgtagcaaagatgacttccttttcaactgtaaaggaaatctaagtcctagtgttgaaaaggagtcacaaccagataacaaagtagaggctgtctctgtaaatcataatggaagagatatgtcagaatattttttaccgaatccttacctgtcagctctgtcttcatcttcaaaagatttagaaacaatagttactcttaagaagactatcagaatctcaccacacagggagagtgaccattctagtctaaataacaaatatttgaatggatgtggagaaatatcagtttcagaaatgaatgaaaagttgacaactctgtgttataggaagtataatgatgtctctgatctttgcaaattagaaaataaacaatattgtaggtggtccaagaaccaagatgacagttttacaatttgcaggaaacttacatatcctttagaaactctttgcaatagtccaaatagaagtacaaatacattgaaagaaatgccttggggacatatcaataacaacgtaacacagagctattctattggttatgaaggtagctatgatgcctctgctgatctctttgatgatattgctaaagaaatggacattgcaactgagattaccaaaaaatcacaggatattttgttaaaatggggaacatctttggcagaaagtcacccttcagagtctgatttttcactgagatcactttctgaagacttcatccagccttcacaaaaattatccttgcaaagcctatctgactctaggcattcaagaacatgctctccaacacctcattttcaatcagattcagaatataattttgaaaatagtcaagactttgttccatgttcacagtcaactccaatttcagggttccaccaaacaagaattcatgggataaacagagctttcaaaaaacctgtattttattcagatcttgatggtaactatgaaaaaataaggattttccctgaaaatgacaaacagcaagccagcccaagctgtccaaaaaatataaaaacacctagccagaaaatcagaagccctattgtatctggtgtttcacaaccagacgttttcaatcactacccttttgctgagtgccatgaaactgatagtgatgaatgggtccctcctaccacacaaaaaatatttccttcagatatgcttggattccaaggcataggtctagggaaatgccttgctgcctatcatttccctgatcaacaagagttaccaagaaagaaactgaaacatattagacaaggaaccaataaaggtttaattaagaagaaattaaagaatatgcttgcagcagttgttacgaaaaagaaaactcataaatataactgtaaaagttcaggctggatttccaaatgtccagacattcaagtcttagcagcacctcagctgcaccctattcttggacctgattcttgttcagaagtcaaatgttgccttccattttcagaaaaaggcccaccttcagtgtgtgaaactcgaagtgcttggtcacctgaattgttttcataaaaagtcacctgaacccaattcctgaacttttaaatctgtttggaaatgtttgccttcaggggtacggaaagcattctttacattttgaacacttggagagaagcaaattgaaaacaggactctgctgggagctactgtgccttttaaaatataaagccattgttttccccagggttttatctagaatactatgattaggtagttgagcactttatcttatactgtttattgtactttaataatattgttaagattgtttttgaaagtattaatgtttgttaaaatcacatatacatccagaaataaagactttgcaaaccaaaacttagtcttttttaattgttcagctcagaccagaaaatgccagctatattataggccaatgagtgtgctgagtttgggatagaaagctacaagatcactgatcttaaaatatgttagtctgctggataagacagataaacaggtaacttcaatacagtgcagaagatgcaatgatatgggtttgtaatgggcatgacaaacatttacgttgctatgagagcatggaagaaaagcagctaactcatcagtgagctgagggtaagaagaaacgttttaagaaaaaaagctatttagaagttgtatgtgaaactgttgctattttatttaatacgtatacactgaatgcctactctacatgccaagggccgtgcttagtgctggaaactgaagataaaaatcaagctccttccctcaaactcatgagctattggaataatcaggtaattagaatctggtaggttctatgataggaggtaagcttggggtgctaacaggaacaaaaatgaaaagcaattttcagacactcaagtcttagcagcagctctgctgcaccctgtgaaatctttcacatatacctggccaggttcctttgccattccccacagcaaccattccaaaacaatactttcttcatgccacaaagcaactgctactctccttgcctcctacttcatggacaatattgagatcacttgatattttctcaacttctcgcacccatacctacccacatgtctatctgtactcacccacagctgctttcctctagtctcagaaaataccatctaagtgctaatctttccatttagactattgatctattacacccatctttgaggtcttataccaaatattccccctatattttcaccttcttgccctactgtgtctctccctctccacaattttttattttgaaaatttgcaaacagaaaagttgaaagcggccggacgcagtggctcatgcctgtaatcccaacactttgggaggccgaggtgggcaaatcacctaaggtcagtagttcgagatcagcctggccaacacggtgaaaccctgtctctactaaaaatacaaaaattagccaggcatggtgatgcatgcctgtaatcccagctactcaggaggctgagacacgagaatcacttgaacctgggaggcggaggttgcagtgagtcaagatcttgccactgcactccagcctgggcaacagagtgaggctctgtctcaaaaaaaaaaagttgaaagaatagcacaatgatacggaatgatacggtatctgtacataccatttagattcaatcattttaaacattttgcctttgtgtgtgtgtgtttggtttctgtgtgtctaaatagatacagttttgctttgctaaaccatttaaaggtaagctgcagacaggacatttcacccctaaattcttcagtgcaaattttcttaaaggcttctctctacatagccacagtatcattatcacaccaaggaaagataacagtaatccccaatatctaatattcagcccataatcaaatttttctacttgtccccaaattataattgttatttaaccagaatttcatcaaggttcatccatagtgtttgcttgtctctttttctagaacctcacctcttatttcacataatagtaactttatggaaaaaaaacctcaaaccactgttctgtagaatgtcccacattctcgactggtatgtttgcttccttatactatcagtacattgtttctctaccccaccccagtccccacatttcctgaaaattaggcctaaagactagatgtgattcaggttttggcagggatattccatggctcatgttgtgtactttatgttgtaacacatgaggagacacaatatcaagttgttccactattagtaatgctaagttagattgcttggttaaaatgttgcccaccggatctcgatgttaaatatactttatttttcctttttaagagtaaagagtcagtggtggtaaattagtttgcttttccttctatcactacagactcaagaatttttatttttcctatggaaagaaaaacaagccacgtctggtagcttatgcctgtaatcccagcactttgggaggccgaggcaggaggcttgcttgagtctaggaattcaagaccagcctgggcaacatggcaaaacctcatctctacaaaaaattagccaggtgtggtggcacacgcctgtagtcccagctacttgggaggctaaggtgcacccaagaggtgcagcttgcagtgaactgagattgcgccactgcattccagcctgggcgaccctgtctcaaaaaaactggtgcatatttattgtccaatcatttcatacaaagattcttaattctttctagactgtttcctagtctttgggactaggaaatagtctgtgttctttttgtcagatgttctattcctggctaatttcatacctccctctgtgataaaagagtaacgatgctgttagtatttacaatgtcatgacttcagaaactgtttttgttgagctatatagatcttgccttagcagttacctaatgtcatttgtttaatgctagttcctctgtgatgcagcatccgttgtgctactgtgaatactggtttccaatgatctctcaaaggttgttactatactttgctggtgactaccgaaaagcaagtcctacccagagtgtgcaggaaaataaataataatccattttttggtcctatttaccatttgtactaaatattgcttcccaaccatgcagtcttttgaacattttaggctgcaattactgcactcctatactgtgatctctttcaatgttggctgcaccctggaaggataggcaagagcctatccttgctctgtggttggagcaacaagagcggttccatttgtgcaaagaatatctattcctccatcagcatggcttaacgcctaatctggaaatcacagtgtcactatcaactggaaatgagaggacattgattggaagtgcccactggcattgtggaccaacagtcttaaaaggcctcagagaagataggcatggcctgcagaagggggaagggtgaccttcctggtgtcagtggctggaggcagacagggtaaataacagctgccactaccctcacagaccagggagagccaatgcacaggcctacacacagaactcaatcccaaggaccagtggtgacctttggtagccacaaccctgaacttgtgagagtcacctaaatgaatttgagagtcacctaaaaatatgtcagcaccattctggcagcccaatcttgtactattttatgaaagcactattgcctcagccaatgggaatgacccaggtttgatttcataggcgcaagtcccaagctcctcaggacatttggtacacaccaaacatgatgtagagggttggagaatacctcaaatgggataaatggcactgtcacaagcacaaaagtgagacttagaaaatttcgagggaggcacttctggcaactagctcccacgtgggaccaggtccaggctcagggtggacttctaccaggcgctagaggagaatttagaaggaaacttgaggaaggcattccaaagccttagtctccctgaagcgtagagggctgtgacaggatcccctctcacccaggcctcagaggtactttcttatcatccctccttattgtccttttgtgcctccttatttgcctgttttaaaaagatagtgcctttttttgttttgttttttgtgttttggcaggatctcactctgttatccaggctggagtgcagtggcacagtcctggcttactgcaacctccacctcccgggctcaagcaatcttcccacctcagcctcttgagtagctgggactacaagcgtgcaccaccatgcccagctaattttttttattattatttgtagagacagagtcttgctgtgttgcccaggctggtctcgaactcctgagctcaagtgatctgcctgcctcggccacccaaaatgctgaaattacaggcatgagccacctttcctggccaattttttaaatattttgtggaagacagagtctccctgtgttgtccaggctgctctcgaactactgggctcaagtaatcctcccacctcaacctcccaacatgccgggattacagggttgagctgccatgctcagcccaatgatggtgcctcttatagagtgtctgaatggatagagaaacaagggctaactacaggaaacccacttcacctataaagacatatgtagattaaaagtgaatgggcggaaaaagatattccatgcaactgaaagccaaaaaaagaacaagagtagctatacttagataaaatagaagacaaatcaaggaacgttaaaagagaccaaaaaaaatcactacataatgatgaataggtcaattcagcaagagggtataacctttaaaaatatctatgcacccaacatcagaactttcaagtatgtaaagcaaacattaatagagctaaaggaaagataaacagtaatgcaataatagtaaggggctgggcacagtggcttatgcctacaatctcagtgctttgggaggctgaagtagaggatcacctgaagccaggagttcatgaccaacctggtcaaccccatctccaaaaccccatctccaaaaaagaagaccccatctccacaaaaaattgtaaaagttagctgggcatggtggtgtgcacctgtagccccagcttcttgggaggcttaggtaggaggatcacttgagcccaggagttcatggttacaatgagccactactggagttcacggttactgtgagctaccacaccactgcactccagcctaggcaacggagtgagacactgtctctaaaaataatagtagaggactttaataccccattctcaggaatgaacagatcatctagatggaaaacacctaataaggcctatctgacacatactgaacatttcacccaggtgctgcagaatacacatacttttcaacatcacataacactctcaagaatagaccatgtcttaagccaccaaacaagtctgaacaaattcaaaaaaaggtaaaaaccatattaagtatcttttctcaccacaatggaataaaacaagagatcaatatcaaaaggaacctcagaaactttacaaaattaatttccatggaaattaaacattctcctgaacaaccaacaggtcaataaagaaattaagaaagaaattttaggccaggcacggtggttcatgcctgtaatcccagcacttggggagaccaaggtgggcagatcacgaggtcaggagttcaagaccagcctggccaacatggtcaaaccttgtctctattgaaaatacaaaaattagccaggtgtggtggcgcatgcctataatcccagctactcaggaggctgaggcaggagaattgcttgaacccgggaggcagaggttgcagcgagccgagatcacgccattgcactccagcctgggcaatagagtgagactccgtctcaaaaaaaaagaaacttaaaatgatggtgggtatacaaatgaaagtgggtatacaatatatgaaaatctatgggacatagcaaaagcagtactaagaagtttatagcaataaacacctgtatgaaaaaaagtcaaaagattcaaataaatgacttaatgatgtacctaaaggaattaggaaagcaagaacaaacctaaaattagtagaaggaaagaaataataaagatcagagcagaaataaatgaaattgagacttaaagaaagcccaaaagatcaatgaaaaaaaaaatggttttttgaaaagaaacaaaaccaacaaacctttagctagactaattgtattagtccattctcacactgctataaagaaatatgtgagcctgggtaatctgtaagaaaagaggcttaattggcccaccgttctcagactttacaggaagcatgacagcatctgcttctggggaggcctcagggagcttttgcttaaggcagaaggcaaacatggtgggagcaggagcaagagtagggggcaggagtgctacacacttttaaacaaccagatctcatgataactcaccatcacgagaacagcaccaagtggatggtggtaaaccactcatgaaagatccacccccatgatccagtcacctcccaccagtccctacctccaatactggagattacaattcaacatgagatttggtggggacacagattcatgccatatcactaacaacaaaaaagagagagaaagaagaaccagacgaataatattagaaacaagacaacagagaccacagaaatacagagaatcagactattatgaacaactacacaccaacaaactggaaaaccaagaagaaatgggtaaattcctggacatatacaacctaccaagactgaatcatgaaaaatatagaaaacctcaacaaaccaataaaaagtagtgagatcaaagctgtaataaaaagtctaccatcaaagaaaagcccagaaccaagagcttcattgctgaattctaccaagcattttaaaaagaacaactacaaattctactcaaactcttcaaaaaataaaaattgaagaagagggaatacttccaaattcattctacaaggccagtgttatgctgataccaaaccagataaggacacaaagataaaactccaggccaatatcactgatgaacatagatgcaaaaatcctcaacaaaatactagcaaacctgatttaagaacacatttaaaagatcattcaccatgatcaagtagaatttatcacagggattcaaggatggctcaatatacacaaatcaataaacatgacacatcacattaatagaaccaagaacaaaaactgtgattatttcaatagatgccaaaaagcatttgataaaattcatgtcctttatataaaaaaacctcatcaaactgagtatagaaggaacatacctcaaaataaaggccacatatgacaaacccacagctaacattgtactaaaaggggaaaaattaaaggcctttcctctaaagtctgtaacaagaagaggatgcccattttcaccatttccactcaacatagtactggaagtcctgaccacaacactaaggcaagagaaagaaataaaacctaaagacttaaaaaaaaaaactactagaactcataaacattcagtaaagttgcaagatacaaaatcaacatacaaaaatcaataggatttatatatgccacgagcaaacaatctgaaataggaatcaagaaagcaatctcttttacaatagctacaaagaatagaaaatacctaggaatcaatttaaacaaagaagctaacaatccatgcaaggaaaactataaaacattgatgaaaaaaattgaagagaccacaaaaaaaggaaagccattccatgctcatgggttggaagaattaatgttgttaaactgacagtaccacccaatgcaatttacagattcaatacaatccctatcaaaataccaatgacattcttcaaagaaatagaaaaaaaatcctaaagtttatatggaaccatggaagaccccaaatagccaaagcaatcctgaacaacaacaacaaaaaaacctttcagctcatcacacttcctgacttcaaaatttactgcagagctagagtagccaaatcagcatggtactcttatgggatccttggggtgttgcttcaccaaccagaaacctctgtggccaatggtgcctttgccagagtttttctcaggcccactgggcccattcagcttggcagactgcacttggttcatgctaccagcttggatcccatgcctgtcaagggtgaaaggagcagcagggggtgtgtgagtgagcgagtgagcttgaggtccagccactgcgcacagccaggcatgctaactgcagcaggatgggcagctccaggaaccagcacaagcaccagctctctgcaaggctgtggctggaccagtcatcccacaagctacttccacagctgacattggggaatgtggtggggcccagaagcttggagatgccaggaactgcagagccccaaagaggatgtcacagccctggcttaaggagctactaggtctgggatccccaaagggctgcagcttttctttcttttttctccctgcaatatggtgagcaaggggcatgtatcagccctgtttgtgttagagctctttcatccccgccatttggtgggtcctgagttcttgtcctgcgccctggaagaataaggtacacagacaagtggagggtgggcaaggcgaataggagctttactgagtgatagaacagcccagaggagactcacagtagataacttctctccacagccatggtgtcctgatgagtgttcagctctcagcagagaggagaccctgtaatgggtagttcctctctgcagttggttgccccaacatctgctcagctctcagcagagaggagatcctggagtggcagctatattagtctgttctcacactgctgataaagacatacccaagactgggtaatttatacagaaaaagagatttaatggaatcacagttccacatggctggggaggcctcacaatcatggtggaaggctaaaggcatgtcttacttggcagcagcaagagagaatgagagccaagtgaaagggattttcccttataaaaccatgagagaatagtatggaggaaactgcccccattatttaattatctctcaccaagtccctcctgcaatatgtgggaattc

SEQ ID NO: 48 - DNA, 175561 bp, Homo sapiens
aagcttctctaaactgaccttggaatttgaaccaccatttataccatcatttctgcatggaagtgtaatgtaatttccaagaaaatgacttggagatgaattgtgagctcagtctgatcagaagttggaggcagcctagattcctttggcctcctggtccctttggcctcaacgtgcattgttatcctcattcctaatccccagatgcaaatattgattgatgtttaaatggcaacttttcattaatgagcttagagcactttgtgaaaatgtgtgctcttgccacctctgggacatctgcctaagttgtggtaagggttctggctaggagttaagagccctggttctagttctgaagctgccatacattagcttaaagcctttgtgcaagagagaggagaagagctatacctttgaggtccttgcattgccattgtctatgatttatgattttatggtgagtagatcacagacagtgacaggatctttccatagctcccttttctggtcaaaatgcagcaagaatagtccaaccactttactaggatgtctttatttttatggcttttccaccaaatgtattgctttccttagctggcctgggttttggggacagatatttggctattatgtccacaaatgcccttgacaacaggcaacggaggaggtaggagccagaagctttgtaagtttcataacttacagttcctgctgggattttgatttgatgaacctgtgtcaccttaataaattatgaaggcttctcttttccttgaatctttccttgtgtctttgttccaaaacaggccaaagaatgtgctctagaaattggccatctccctgttttgaaggtgaaagattgctgggtgtcacccccaaaaggagacctctctattatatgtttctgtggttccaagctcactgtgagctgtgcctttgacttggcaaaggaattcatcgtttgaaaagctatttctagcccagcacagctgttcactgcttaagttcagcaaatgccaccatttttgcagactgtcctaatacccccagagaaattatggcaacctaagtgtgtgactttggtgagtgaacaaagaatgaccacttgtccaaggtctcgcagaagtcatccattgtacatttgattatattctctcctctcttatctggtgcaatgtaggctcttaaaagcaaaactcaaaagaggttttttgcactacgttccttccctgatctttgtgaaatcaaggaatcagatgataatagtgataaactaataacagcaacagcaattctgatttctttgatgcttcttatgtggcaggtaatatactagatactttataaaaattatcatgctcatttacagatgagagaaaagaggcatagcaagatcgtgcaatttgccaaagaaacttcttaactaggaaatgtcagatgtggaatttaaacctgggttcaccttggtagaaggctcatcgtattccactatggcatgtggattaaaatacggatgtggagatatggatgtggatggggagctctgtaactgccctggctccgtttagcttacagatctttgttaaggttctttagcagtttgcccctaattctgctaaaataagatccgcctctctagcccgttccccacctacacaatgacagaacttcttccctcagcctttcttctgtatctctgggaataccccagtggcagtggcaggaggttgcagcacacataactcatgccactgcttgcccttccctagcccgctctgctggcctcctgatcacctagatgatgctgtctggagctcccgctccagagcgcctgtcaatctgataaagctctgggatggcgctacactgcctgtgacctctagttgaccttgggccatctctcctcccttctccagctacttacaagcccttgatgtccctgctcatcccaggtctctctctggctggaggggaaagaactcaaccttctgtaccctgcccttttgtgtgtttcattttgtgtgtggatggtggaggtgggaaggtgcaggccggcagcggccttccttgggcccactctggggttacagtttgttctgtttctccctatactcctcccatccagtgcatgtaagccccgggggtgctggatcagaatggttcacatggtggagtgctgtgctcagatgtgtggctctttttttggtcctgctactgaatgactctccagggctccttctcctttctcagttaaagggaagtttctctcccagggctccatggtggacatgtctgtatatgaaaacccacagactccaggaaccacagaatcaggaagtgtggctcaagggagcaaggtggcatttcctcacagacactgggtgtccaaattccaggggtagtcaggggaggtgtatgtgtgtggagtgctggctggataatatttcgagctagctagctattgtgattttatccattttatccctgctttttctcttgccctcctgcaccggcccctacccgccacctcccattcaagcagataatagctgactctgtgctcaggcctcacaggaggtttgcagcaaggcacaaagcaaagactttgcttctaagctttggaaacaaaagcctaagccctcagcagaagaggattcgatggaaaacaaaaacaaaaacaaaaaacaaaagacagattgtcctgaagaaacatggaaggaaagaagcaatttccccaaactagaaagaaatcccatttggttaacaggaggtgaatgcagaggtgacagagagacagatggggctccaggagcacagaaccaagcactgcttcctgggagagtgatgtcagcatgactcaaaggcggcctcagcagagatgcttggggacccgggagccacagcacagagtgactagacctgaggggtcaggacagccaggcaagggcaaggctgtctcagggatctgtagacagagaagcgaggaccaggtgggcctcaccccagaggccttggcactgcgtgagctccagaaactctggcgttaataaccacgggcgagggactcctgggaaaactgaggttatgcatttttttgtttattttttattttttctgccagccagaagaaataagagcttggcattataaattaagttgttacagaaaacaaaagaaaactcgtcaaccttgtgtttgtggactgggattcacgccctctgccacctgccctcgtacccctcgtgttcacccagaaggagataagagagcctgtgctcgtactctatcctgggcatttggctagacgcaggccttctgtcctggacccaggaataggtagcattgaccacgaatgcttcgtattacactttcttttccatttcaataatgattcaacaaaacagttttaaatgaaaagcattcggtaaacattgttcagtttttccaggactttaagcttcagagggatgccacaaaatcatcttcagagaagtttatggtgcttgtaaggctgagaaaacaagagtccttaagaaaagctctgattaaacattgtagagcattgtatttcctgccttgtaattgtgatagatggtatggttttgtttttaaacaacacctcatctttgaaatgactctgctggaaacctagcattttttttttttttcagaatatttccactgtgtatattaaattgactaaacattcagaagaaggagcacaaatcagacccaggagagtctgttgcaaagtgtaagtaggagagaggagatgttaccaatactgaaaatacactaaaattctgatgaaagtaccagattcaatcccatgcaagcctcttaggaacactcaaactgttgaaaataaaatggaaaaaagcgattacacactggcaccagcatctaattgtttaatgaacattacatggcctggatcctattactaatgtttctcttctttgacatatgtccactgatgaaggaaagttctttttgggttgcaaagtggctttcagaatttggacgctctgaaagataacaaacaggcaacatcttttacttcttgctcacaagtaaatttctggcagtttttgacaggtcataaacacacatgaaatgctaaacgtagtgggttgttagatgctttccttaaagttgaaaaacatttttaaaataagtttccttatgtctacttttttccacattctcaactctgacattcaaatgcacttcacgaaccgacacgtaataacatttgaaaaccaaatttggaaaaccttcacgaattcagacttcactcttagagaattttcaaagcattcttgagacaagcaaatcgaggctgtgaataagattactgagaataatgcttacttaagagaaatattcatgtttgttagatatgcacaagcagttaattacatttggagttgtgcttgtttaggtccttttgtgagagcactgacactgtttagaactttctagaaaagctttcatccattggtttctgtgacttcactcttccttgtatttccaatgggctccctggacgcatctcctcaagctcttttgtgggtttttcttcctcacccagctacttcaaaggtggagttacttagggttccatccataaacctcttcttttctcactccacaaactcacccaaaggtttgaattaactatatgcagataatgctcatgtttatgtctccagcctcaatctcttccttgagctccctcatgtgtatcctgtcttagtgggtgactccactatctattgctagtctaagccttaaacctggaatttatgcttaattcctctctcccttcccatcatcatcctaaatatcactttaaacatccaccctgtctcttcccactgttgtcaacttattcctgccatcatcctttcttgtccaaatttctatagcaatcttttaactgatccatctgcttctaaaacctttctcctgctaagaccacagaaatttttctagaatgcaaatctgaacgtgtcactcctctgctaaaaaaacttgttcagggccgggcatgatggctcatgcctgtaatctcagcactttggaaagctgagacgggtggatcacctgaggtcaggagttcgagaccagcctggccaacatggtgaaaccccgtctctactaaatatacaaaaaaaaaaaaaaaaaaaattagccgggcatgctggtgggtgcctgtaatcccagccacttgggaggctaagcaggagaattgcttgaacccaggaggtggaggttgcagtgagccgagatcgcgccattgcactccaacctaagcgacagagtgagactctgtctcaacaacaacaacaacaacaaattgttcaggactctcattgccctcaagataaagcccacacttcgcttaggctgacaagggccttcatgatggagaccacattccaccctcagcataactcttgcacaccagactgaatgcactgtttgcattttctgttccatctgattagaatgccatccccctcacctccactctcccctggatctataaagctttcttccatctaagatatcacctcccctgggaagcttctcatccttcccaagattgaataagggacctctcctatatgcttctatagtacttacatcctatattacctatatcacagcactcaacactctgaatttcagcagcagctttattcatcagttttctcagatgattgtaaaaaccttcaaggtatcttcctcatcatatctccaataatcagctcattctagattcttgaaaaacatttgacagatagatgaatgcagttactttaaagatctgtttctcagtttcctgattctaaattctgaacagggagaatctaatttgcccagcttgggtcagtttccatccctggtccaatgagctgagctaggggtgtgagagtatggatggaatctcttagaaaggagtgtggggttagaagcaatgggtggcatgcataaccaaattatacaatgttcttcattgaaacaataaaactgcattgtagtttttaaaagtcatatgttatatatttttcattaattcatgagcctcctttcattagttcattataaaaaggtatcactgtaccttcattttaatacataaaataaaaattatacagtcactttttacttattattagggactcattcatccaactgttcacaaatattactaagtacctactatgtgcgaagctctgtgctagggactcggtagatagcagaaaataaaatcaaatccctgctgtcatggtgcttgctttaaaaaatgtaaaacacagatgcagcattttaaattagaaaacttaatatgaaagaagacaataggatgttctgcggaaaataactggggggatgtgattcagttatgagagccaaggaaggattcccaatcgggggaaaaaattacatcaaagctaagatctggcttctctgggaagaatgcctgggattggagagttgcgggaggacaaggacggaactggagatccctgtggagttattatgatacttgcagcaaaagactatgacgcctatgactgttgatgaattcaggagattctgggagccagaactgattgcactttgattgtttctatgtagggtgaattaaaggtgctaagaataacagttggggtagaggttaagcacatgaactctgaagctagattgtctgagtttaaatcccagttccattagtaagttatgtgaccttgggcaaattacttaacctcactgtgccttggtttcctcatctaaaaagtgggtgataataatagtagctaccttgaagatttgttatgaggattaaacaagttaacatgcataaaacatttcaaacattgcctgcatgtcggtttacttacaaactgaaaaagaggtaagtttccatgcttctggcttgagcaatggagcgatacaggtgacatttattgagatgggaaagactagcagaaaaagagactttgatggactgaagatcacagtttagccttagatacaggcttgagattgctcagacctcttggacatctctctttgggcaggagtctgatctcagaagagatccctgggctggagatgtcaatctgtaagacttccaaatacaggcaacatttgaagcccagggattggaaaggcaagcaaggaagagtgtgtagagtgagcaaagtgtgaatacagggccaaagactgaccatgagagttccgaaagccaagtggagaatgaggggccaactactggtttatgtgcagtgctgttatgcacatgcattagacaagtggaaatagaaacatctggtataatttgaatataaggaatattcaaacaaaggacatccttgtatttctattttaatggagcttaaaactctaattttctgtttagccctgttacattgattttatggcttctcctatccctcattggaatctctgatccaaagatttaaaagaaagtctggagaatttggagatatgagtagtttcatggctggatcttcaatggcgaagacagaaggtggggcataaactagaaccaggtgatgaaatgtcttataagctgtcataggagtttaaacttgataacagtaaggagccattcaaagtgttaagcaacagtgaagcacgattatttcgtatttgagaaagatctttgttgaacaaggtagaaaatgcattgaaaaggagcaaatccagaagctgagaggccaatggtgcatctgtaacagtaacccaggaaagaaaaggcaacacaaaggcaaagaaaagacaaaccaggactgtgggggaggccaacggttccaatttaagtaatgaccacagcaagaaacagacaggatgaggtgattgactagttagagaaggtaagagagaggatgacgccatggcctctgcttttgttcagactattctgtgcccttaaaatattacatttttcctaatccatccttatgctccatgcagcaccctcaatgtcttctgtagggataaccctttaattttcaaatatgttctcatcctgtctcctgatgaatgcatgcagtcattaattagctcaagtggaaaataaagatgcgacttacttcatatgcactctaggtcccaggcctgggtagaaaaaaaaatctattacctaaaccacagaagctaaaatcctccacaaagaagaaaataccccagtgattgatttggtctccacatcacctggcttaactaagtatagaagtattaatatgctagaccctatttattaaaataatttagctcatcattgtgacagaaagcccatgtttcaaacagcaatatttttgtaataaattagaagtccctcaacaaaccctgttaaaccccatgtggatttccgttaatggggaagatttcccagtgacctagcttaacactgctgctgcacattaatttgctttccagctatacataaataaataagtggctgcctccttgatgtgagctggaggacccaggggaaggcatttttacctctaggtatcttccccagacttcttatgctgtttataattatcatattcatcatttttttcttctctctcttcccaatttctttcttcctagtctctcttgaacctattcctatcagacttatgcccccaccattccatcaaaactgcttgtcaaggtcaccaatgacctccattttgctaaatccaatggtcaggcatcagtcctcatttaacatgatccatcaattgcattcagtgcagcaaatcaccacctcttccttgacacacattcttcatttggcatcaagaataacacattatttccatttttttcctacctcattgggcttagccttccttgctggtgttctccatggtctcttagtgttcagaatacctcagggctcagttcctagtcctcttctctataacttaaacccttgatcgtctcatcccgtctcatggtattaaataacacctttaccctaacaactcttcagttagtacctcctggtctccagccttactcagcatctccacttggatgttcaatagacatctcaaactcaatgtgtcaaatatggaactcctcatctcccttcaaaaactgttctactcatagccttccttatctcagttgatagcaacttgattaagccagtgctcatgccaaaaatcttgaagtcatctttctctctttctctcacaatccacatctaatcttgttgatagtgtctgcaaggtacacccagaatccattctcttcctacctttccactgctaccatcctgatccaccaactcttggctcaaagtcactacaatatactcccagcttctcttcctgcttatacacccttgtctagcaccagaaccatagctcaagtaatccttcttaaaaagtaatcagtggcatcacttctttactcaaaaactgcaatgacacagggtaaaagccaaagccttaaaaatgccttcaagctcctacctggtctgctccctcccctgagtttcaacctcatctcgtggtctcccctgctcactctgctcctgaccactggcctccttgctgtttctgagacatgccagacaagctctatgtgtgccctctgccttgaatgctgtcggatactagaggccagccccacccttctttcatggctttgttcaaatgccatcttcccaatgccacttatcctgccatatttcatactgtcacttgccccagccccagtggtcccagcctccttgccctgctttacttttttctttttccatagcacatatcacttcctattatgtgatgcaatctgcttatttattaggttcactatcaactgtcatctctgctggagtgtaagaatcacaaaggcagaggtctttgttttgttcactgatgtatcctgaacaccaagaacagtgcctggaacataggaggcactcagtagatgcttattgaattaatgttttaggcttcaatcacaaggggccctagtataaggcaaatattattggacaggtgatacattcagcttcaggtttccaatctgagccattaacatatcttacaagtttgaacgaactacaaatgagatgtctttgatccatttcctttctagctcactccttcaacacatttttcatcccagtgctctggtcctctcctcaggacagggaatggatacagtcaatagtgtctgttcagggtttatcctccctagagtaatttggtcctctttctccttattcccatgaaatctgaactgtgatccaatttctcaagaccttaaaactaaaaaaaatgagaactagtgaccccattttaagaaatattgcagattgtaaattaagccaatgctgctgttaaaccagatttagctcattgacatctagaggaaatacaaacgattgccagaactttatagcaagagagaaggatacggtatagtgggaaacccaagcaaagggctggattgggagctctatgttactagaggctaacatgaatgtcccagaggagcgaaaaagagggacacaaatggaaggaacagatcatggggcacacaccttatttttgcctaaggtggacaactgggctaattcaccaaaggttttgtgagccccccatcgtgctgctggcacctaggatagccgggtggaggcttctccaacaattctaagaaatacccatggaatgagaaatgcccaggcagatatgtggcaagcgctatctcccctggagctcttctggagaccctgggccacttccacaatgctttctacactgagaacactctacactctcactctacactgagaacactcattaggatcaacactgagaacactcattaggatcaactagaggcaggttgagtttttatttcactaagtacccaagctcttgtgcataattaatcctcaaaaaactaatttctttcccagcactgaattatccttggtcaaaaagaaatcaacatgataaataccaggcacatagtgggcatttgacatccttcttcccatgtctctcgttttcctctagtacccaccctcccaacctcctttgagatgactattttccatatttgcttctttcatggcatatctgtattgcttcgtatttggccccagatgtcagattggcttgcattactccaggctgaatcatttgatttcctgtccatgttcctaacctttccagatcctcttgtatcatttctcagtcattcccgctgtttacaatacctctcaatttaaagccatctgcaaatctcattaacaaaccactgactccttctccctcacgatcataggacatgttgaatgaaacaagacctgacagcaatcctctcctctccatttgaggcaccatttctctgggttactttaacttattatcatttttatattatattgttattgcacatgtactcccagcctaggcatatctaatatgtgaaaatcgggattcatcattttttgaaattaagttattcacaggctgggcgcggtggctcatgcctgtaatcccagaactttgggaggccgaggagggtgggtcatttgaggccaggagttccagaccagcttggccaacatggtgaaaccccatctttactaaaaatacaaaaagtagccaggtgtggtggcccacgcctgtggtcccagctactcaggaggctgaggcacgagaatcgtttgaacccggctggtggaggttacagtgagctgagattttgccgttgcactctagcctgggtgacagagcaagaccctgtctcaaaaaaaaaaaaaaaaaaaaagttattcaccctacaaaaacttaattatattaatccctttactagtgacttttcctagtatacttaaaatactttgcttacaaagtaataattacccaacttctcaaggctggttacagccttgaatataggtttttaataccctttagctacatctgtctgtaagaaattttttcctagtagagtttttgaataagattcaaattctttcacatcaatattagtaagcatctgaggaacacaccagttttctcactggcgattcattggatcttggcttcaacttttctcaccccttttcctgatatgctcaaaatatttccaaatctcactattcttccttccttaaaactttttgtgtcccttctatgtgccaagcactgtgctcagtgctggggtacaataaagaaaagagtctccattctctggagctgttaatccaagaaaaaactaaagggaagtagtacttttgagtacctgccatattctggacctgcaatgtatataatcccttttacaccccacagaaaccccatctaatagctgagaaaacaggagttcagagaagttaattaatttgcctgtgatgcagaatacaaatagacaatttacagaagaaatacaaatggacgatagacatatggaaaaaatactcaaccatgcagttattaagtaactggtttattaagtaaataaaatgctacttttttacctatcaaggtggtaaagagaaaaataatactctacgctggtggggttgcagtaatacaggctctcttgcatagggctgcagggaacataaaggggcaaaatcctcctgagaaactgtataatatgtaacaaggaccattataagaggaactcaccttagtgtccatcgcaagggaatgaaataaatgatgttacatccatccaatgaaattgtacatagccactaaaaatcatatagaatatgtaatgacctagaaagatttaccaaatattaaatgaaaaaggcatattacagaatagtagatactactggatgacaatatatacaggattgtgtgtatgtgggtgtggagaaaataaaagactggaagaatggataatatgttaacaggggttattcataaaagatacgacagagttctttctattggtatcttctacatttcaattatttaaaaaacccaaacataaaaatgttcatacattcagatctagttatgcaactgtattgcaataaacagcaatgcagactaagagtcaagtaacttgctcagaaccacccatcgggtatattactttaagtctcgctttctaagtctgaaatccattttctttctacaacctactcattcagctccataaccccaattatatcctaactagagtaatcccttgatgacctttctagtttctaggctttttatcacgagattaatttctcccaccaaaatggtttgctgttctaaaatctctaagctggcactctttctgcgataagcaactctttcttttctcaaagcccgcttgctggcaggtcatcccgattttcatcatctgcttttgttctgtgaaatctgatgagggcttacgaggtcttcagcatctctcaacagcaaacattggtatttgggtttgaacaattctttttgttgagcagggctttgttagccctagccagcttaaatgccttcaaggcttcactgtgacaacagaactgccaccacacatttccaaacacatcccaagggtggccaattgagaaccaccctatgatcggccacagctaaccctctgacctcatctttctctactccctggctttctggctccattccagccacactgggctccttgctgcccttctcataagcccacaaaagcagggatttggtggtggggattggggtggaggggtgttcctttcatctgtacaaccagttcctgtattcaattccctcttttaagcacttgatttgtttttgatcccttttaaatttgattcagcttccccaactgtaaatgaactaaccaatgaaactaatcactgattccacatgttcccaagctgtgcacttctaccgcaggatcttccaaggtctgaactgaaaactgcgtctgcatttccttttaccttctatgttttgggaaggtatctctaaactatctcttcaggacagaagagaaaaactacatggatgcaaatcagtcatactgcatttaaattatgtgcatctctctgttattgttagttccttgagggcagtctttgtaaccttctctttatattctccccaaataaatgagtgcctggaaatcataggtactcaagacctccacagcagcctcctccctgagagattaggtggctggaatgtgattagacacgtgggcatctccaggcttccacacagcagtcattactgagtgacagatgtcaatcctggcatgaatgtgatttgcaaggctccaaaacggagattggattaaatttgcttaaatttccattaggctgtgtgtgtgtgttattttttcctttctttttggtcttttttctcttaatttctacatctgctatatacactccccaccgttttctaaaccattttagcagcagtcaaccctgtgaattggatgtcatatgcaatacaaaatgtaaatcatgttcattagatgaaaaacgcaatttcccccctcatggagaaaactgggacaacacatatcagaaggggcacaatatgacagtcttcaaataagtcagtgtgcttcctgcatttaaagctgaaatctgtttggtcttaattgtgatatttgcaaagtgtcatgctttcttctacattgaaagatttcttagctacttcaaaatgtgaattcgtgagcggactaccttctccaaactaggatctggggaaccaatcctaattgtatttatacatgctaaagttcccctgttctttccactcacgcaaaacgcaggataaatataatagcttctcttccacttggaaaagcacaagttttggagccttgagttggctgcactggaaattagaaatgtctttgatgaggcacagctgtcttcatttcttagtcacaaatgtctaaagcattccaggaggctgactcatatacctggagagggaccatggtttctcattttttctcctgaagcccttgactggtcaggaagagaccagtttctcctttgttctacagctaggaacttaactacaggatgatcttaagtaagataaaacctgacatttcttcaccaccatttgcttttcattctcttacatttgtctcaaacataatgtgcagcacttagtgatctttctgctatggagactcactgaagacaagatcccaacatggcaaaacttaagagttttctcaccaatagctgctatctgcagcaaaggaaagagagcaccttgtgttgtagcctaccgtccactgaaggagatcagtatggacatccaggagtttctgagttccccagatagtctcagacgaaagtcaaacctctgagatgagcaattaagaaccaacatttttgaaactctttgtcatatggttcgcagctttgtgactctaaatagttgtctttccgcaaataattccattattccacaacagcaactcctcttttctgttctcttgcagcaagcaagtgatcattactcaccacctcaatccacccaagggctttcacctggaacccaaagtgcgtaagtaattaagatttgtgttctttggggaaaggagtatcgacaaagatgtagcttgcttctcatgtgagaaaagtacttacatacctacacagttctacttggaaggcctatgcattttactatatgtaaattacaactcaattttaaaaaaatctactagcaaagacacccattctctcagggaacttgcccttatttaacctacagctataaatgacagggttctctagaaccatatactttgtcccataaacgaagcagtaaaaaaacctgaatatcttccctccaactaaaattacattatttttctcagttaaatcttccattcaattacaatggactatcactatactatctgggtgagcaaaaggtataatttacaagaaacttacagagctgaagggatgagagaactataaccctgcaaagttgtgtgagcatctgaggtcctacacaaaccagtggcctagagaacaggcctctaacctcccttagcctggagtggccagagcacaagtggtctcaacacataacagaaagaatggacattttctggccaggcacggtggctcacgcctgtaatcccagcactctgggagaccgagacgggtggatcacctgaggtcaggagttcaagaccagcctggccaacatggtgaaaccccgtctctacttaaaaaaaaaaaaaaaaataccaaaaaaaaaaaaaaaaaatttagccgggtaaggtggcaggtgcctgtaatcccagctacttgggaggctaaggcaggagaattgcttgaacccaggtggcgaaggttgcagtgagccgagttcacaccattgcactccagcctgggtgataagagcaaaactctgtctcaaaaaaaaaaaaaaagaatggacattttttaaaaacccactatgtctatagctcagtcccagccctgaacaaccacattcaaccagcaaaaaattcttcgcgatgaaaagatttacctcaaagaataaataacattaaatcgagaattcataagcagtcaggagatttgagatttttattgagaaaatagctattttgacattatatccagtttctcatttatcagaataaattctttacaatattgatcaccatcaccactttagtgtatttgtacatagtctctgagtaaaatatattcacactcggcaaggctagaatattgaaattatggccaacattgcttactttaagattgtttactttataaagaagctagagtagttgtgcaactagaacagatgtttttaaaatgtttgccattcaaagataggcttggtgggacaaaactaatatgcatactacatacatatatttcttgtcttctttactgtcaatctttcagaacagtaacatgacattacaaacacctcaaattcccacttcaaaatgaacagaaaaatggaaaaacattatttcccatttcataaaattaaaaatcaagtcagaagagaagtaaaactcatttttatgcatttaacttaaaagcttgaatacacgactcctcctagagagaaggaagccagaacttcagaagtagccagtggtccaaagaataaatggccccatgaccttctctatggttcatgacttactgagggctgatgcaaactctggcaagttatttttcatgatttccaaggatctgggatatgtaaacgaaatgattaaaagacatttctctgaatttgcaagaagacgactgaagaatcagaacaaagatccaacggcctttcacgtggctacatgttcaccattacaccacaactcaaaacccacaggcgagctttctctcaaatacacattcaaaatggtgttccaaataatccaattgtatacattgcaaagacacacaaaatgcctccttacacacgattagtaatctggttttagactctgaagtgataccaaacatatttagctaaccctctcaaaattgcaggcctagtgaggtttaaatgttttaggatatagaatctgcttagaatttagtgaaaactatgaaccgtagactgtcttcggtaatgaacaaaactggaaaatattaaacttcctttgctttgtcactgagcaactataagctttctatgatgtatgtatcatactagcttgtatgtgactttagtgtcataaacacccattgcctttttggcacttttaaagtacagccagaaaaggtttggaaaattgttctggaaatacaagttggttccctctgtctcatggatgcttaggaactgggtagtctgctgaaaccaccagttcagcagacccttgtacagctgttcccggccaactgggatcctaaggaaacaggctggaagagccaggggcctccctcacaaatgcctaaataaccaacatatctatgccgacagccatccctctctcaatgccatggtccaagggagtcttgacctgtctcttcccattttactaccactggctagaggggcacccaacaacaagaaacctttgtaatgagtatgaactagcaaaaacactgtagggcagcatttccttaggtgtatctctcagaacataaatcccacaagatacctacttttaaaaaaatctggccggggacagtggctcatacctataattccagcactgtgggagggtgaggcgggcagaatcacctgaggtcaggagttcaaaatcagcctggtcaacatggtgaaaccccatctctactaaaaatacaaaaattagctgggcgtggtggcaggtgcctgtaatcccagtaaattgggaggctgaggcaggagaatcgcttgaacctgggaggcggaggttgtagtgagccgagatcgtgccactgcactccagcctgggtgacaagaccaagactccgtctcaagaaaacaaaaacaagaaatccatattaaaataaattagggaaatgatgtataaaatagaggtgcttcttggagatttaaaatgcacattagcgtatcaaaggtctgaaaggccaacagtaactcaactttgtctaacccactatttcccaaacttacttggccacagaaccctctattctcctaacaatatattctgacaaaacactccttcaggaactgcttcacccagaaccaaacaggtgagttttaaaaaatattatagcataatttcaaatgattaataaggatacaaagagacttattttcctgtcttttgttattttgtctacttattttgttctgaataatcttctatcacatttccccttctattcacaaaccttcaactcgagttaccctttctgatacctttgttcaagaatgttaattcttatcagaaatccatggcacactagtctggaaaaaaataattttgtgtctttttaaattcctagagtacctctccacttcaatcacaatttaagtccagggcaggtatcctgggctcctagcaaacactacaccccaacaagagtttgggagccaaattattttgcaaacccttaagaacacaaactaaaactaatttatccttatatctctgcaaaaattagcattttgaacatccaacgaaacttcaagtttgaggataatgggcttactgacctgacctttgatttcacgtaactaacaacaaatttctttaaaatctggttaagaaatatgaaaatattgaaaagtaaacataaattccacaaagctgaatggcagcaaaaaatatttcttaacatcaagaacatatacaaaagatgatcattaccacccaaattatctctgttgctcaggatttcagttataaaaatagccaaatcaagacaaagacaattacagcttaaaacgaaaagctacaccttcttcattaaaggtgagcatcttgtcacactgtgcatatggagagagaacaagtacaaggcacgggagaactaccatgtcaagggacagagctttttcaaaatattttatcctcagaagtaaaccccactaccatagaaagaaaaaaatataattagatattttaaatcacagcatttttgacttcctagggaaaaggagtttttggttttagggttttttttttcttttctggtaaggcaaaatagatctttagatatcatttgttacaaacatgagtttttcttaagaatgaaataaaaattctatttaacttctatcatatatttattcaactaagttgaatactatgtttagaaaattaaagttttaaatcatggtttatatatagataatgatacatttaatctatgaatttactttaaaaccacttttattttgaaatacttaagactcacaagaagttataaaaatagttcagagagatcccaggtacccactgcttagcttcctttctttacatgtaagcatttatatctaggttttaaaagggttgaagtttttgacagttgatgaaaaactgtcaaaaaattgtaacaagcctggtaaatgcatatttttggaggaggttctaaggaaacactaccaagttcaagtaccacttttatcacatgcagctgccttaaccaacaggttttctaagatactatcccccttacctgtttctgcctctttcaatggtgtttttccatttttacagacttctgaaaattttagctttgattgaaataagcttccccattccttcatgttaatatatctagcaatattgaatagaaattataaatggaaataaaaatgcttgcttttataaaatctccagtctcgcagcacccccaatataatacaaacaaacttaagttgaaatttggtttgttaatgcccaccttgtgtggtcaaaacacagttttgaaggaatgaccaccttcaatgttctttacagcttctttagtgttacttaaaaaaaaaaaaaaaatcaatctgatggatgattgatggtagtttgttcatggaagatcttcatcttatgggaattatctagtttttctaatcatatactaccaacaaaaataaacacaagcatgttccctttaatcatattatcctccaccattacttccaaaaggcattggctcacagtattctgtttaagattgtggaccatttatcccaatgaactcactcaaactttatctaaaacatatcatgacaggctggtccaacagtctgttcagtctgaaaaaatgttctgtgctctgttcagattgacaaaatgttctttttggccgggcgcagtggctcacgcctgtaatcccagcactttgggaggccgaggcaggtgaatcacttgaggtcaggagttcaagaccagcctgagcaacatggtgaaaccccgtctcgactaaaaaaaaaacaaaattagctgggcatggtggcacatgcctgtaatcccagctacttgggaggctgagacaggagacttgcttgaacccaggaggtagaggttgcagtgagccgagactgcgctactgcactccagcctgggcaacaagagtgaaactctgtctcaaaaaaaaaaaaaagttcttttctaagagcttcctgtatgtgtggctgctccctaaagtactttgtgctcagttacagcttcctgtcatctcatttacttatacataaatagctcaactaagtaacccaacatataaactctcactaaactcacatgttgcatcttagaaaaggtgatctggaagcattatggactatagtgagaatgtaaggctaacagcagttcaaagtagggatgacacaaaaacaaataaatcatattgacagtcattccctctactaaaaaagaataatacttgttattctaaaatgacctcttttgattaaaatttcagttcataaaacattacagtatgcttctttatcaaagtctacatatcagaagaacatgagctccacgttcctgtaaaactttaaacacatttttcttcctaatagacattagcagttttgttgaaaagaaaaattgacataacctagcattatcttttgactttgcccatggagaaacttggagttaaatttactacttaattttagaatctgtcagtgttgatatggttctataaatttttaatttttttaatttaaatttttaaaatttttaattctttaaaatttaaaatttttaaattgtcctgttttacatgtaatatacttgtaatatacatgtaatgtacttgtacgttataactgtaatatatttcaaatactttttggagggtctgatataaatctgatataaattaaaaatgactggccttgaccacagcataagcagatgtctgatgaatgtgctaaccacccttctccaatatacatccatcctagaggacaataaagtctcacagtcatgatttccaatataacatatttaggtttcagactgctggaataatagatttcagattgctggaatctaataatctgcctttgaagatgactgacacacacaaacacacacacacacaccctgttgtagaagtaatgtgcaactcatgaggtactttccctcatccaaacagatgaccaagattttgaagactaccttatttctcacttagttaaaactttcaagaaaaaatatttagaatgacttaaagactcttgtataaataactacctaaatacagaacaaattgggaggatgtgggtcaaacacagctgagctccactcagctcaaattagatgagtcttttgactacaaagctcattttcttaacatatgggttcctgcacgacttgataagatttgctgagcaccacagtaatcttttaagacactaatcaaaaacatggttctacattttaaaaacctcagaagtagttttaggacaacagaagcacctcaaccactaaaataagcaagtttctattataagtaaaattaccacacagcaaatcccttaacagttcagcaaccaataaatagaaaatattcattaaaagctgctatttctgattgttcctttgtattcttcgactataagtgaaacatatgaaaaataattggttgtcagaaagcttttgactacatgatatgcatcttatgaaagaatatgcatcttatgaaagaatatgagccaagcatagaaaacttggaccagatgcacagtatttctactaccctggccatgggctcctcctgagtagtgtctaacaagtgggcaatttcagtaagaattttacagcctagcatagtaacgataaccagtacattcacttcttctggaattaatacaagaaagacaactgaagatgtactacaaagacataggtctaaaactgccacatttgcccaagtaaactaaaagaactcttcctaacctatatcgaacacatcagcaaagaccaatgttatactgaaatgagtattatcagatgttattatatgtaaccacctttaatatttatctatgtgctactaaacccccaaaagattagacttatgagagcataattaaaaagcacattcctcctcactttttaaagttaaatatggtctcttctactgaagcaatttatctttttctggttcctaaaataggcatcaaatttctaaacagaagtaaaaagcctcagccaaaaagccacatattaggtattcagcctggtctaagaaaactaagttaataaattgaataaattaaatcaaataaattaggagtgcacattcagaacagaattgtagcctttggtcagcaacatgtgaaccaaaggcaaaaatctgccatgattaaggcagttctttgtatacagtacgatgtgtttttcttccccgcccccccaaccaagttcatttagcattctctttgttattaaaaatgcagtgccaagctagaatacaagcttcctaataataatagtaaaaatagatggcatagaaagttccttttggtttagagtcttccttaatacctattatggtatcttctttttgccttcacacacttggtgtaagagattactgcaacaatcgtttgactttggccacaaaccatgactactctcagggcgaaagccgttggaaggaattattttcttcttctgctggagtcaatttaagtgttggcagtttccgaggaggaagctgagggctttggcgaagattgtcatccatctgtagaaagtacaaaagatacatctgactaatgctgtggcaccgcttatgtggactgtggcctccccatccaaactatagcctagaagagtacagaaccatatgtttcctgggctgctagagaaacctttttcttacaaataatctcaagaattctaaatgtcatacctcaaataccagctgactcagtttctgtaaaaagcaacgtggctcattcctgataccttcacagaattatagttaattccacaaaataaatattctactgaactcaaccataacttaaagaggtcttctgatagtaagtgtaaaagcggtactgttacactaagctccagtttgcaaactatgttcacgtacagtatcttatttgatcttcccgatacgctatgaagaaaaggcagacacagaccttctctgttgtacagatgagcaaaacgagactctgtaaggttaagtgatttgccccacgtcacaagctagtatgagagctgaaacttgaacccaggtcttctgattccaaaactattattctttcaactatacttctttacctcaatgaaaatgacctgtattccaatcaaaaaagaccagctttttaaaactgagaataggtagaccaaaggaagctagtacattaggcaaaaagaaagataaattctttaaatgtaatccagtggttttccaaacactggatcacttctaaatgaggtaacccacatcaagctcaaataacacagtggtggacctcaaaaactgttagccagtgtcatcaggcctcattgccctatgagtttgtaaaatagtaagtattactatttgtatcaggaaaaaaaaaaaaagcaagcttatcagttacaggggaaaaaatatgtaacctctttgtatttttcctagtagaatcacacttgaaatttcctttgttggttctctcccctacccagttcctcaatgtttctctcatgaaaagaacaccccaagtggcaaaatatctacactggtgaaaaaactataaactatatctagagcagagaagaacaagaaggagaaaaaaataaaactttcatgtggaaagaagaaaagaacacggtgctgttaataagaaaggataagcccagtgcttacaatcttaagaaacattaagagacagagaggcagacacacaagcaagaagtgtttttgctttgtttttttttgtgttttttctgatggagtctcgctccgttgcccaggctggagtgcagtggcacgatctcagctcactgcaagctccgcctcccgggttcatgccattctcctgcctcagcctcctgagtagctgggactacaggcgcccgccaccatgcccggctaattttttgtatttttagtagagacggggtttcgccgtataagccaggatggtctcgatctcatgacctcatgatctgcccgcctcggcctcccaaagagctgggattacaggagtgacccaccgcgcccggccgctttgtttttttaaagcaaatcttttggatttcctagcttaaagggtactaactgtgtggcaaaagtaaacccaatactcttatctgatctttccccaatcaggccactgttggcttcaaaacactatgttacatacaactttagtgaaagtatatttaaacagttttctgaaaaacaaactctataaaaaaaactaaaagggtacagttaatgtgtgacccaaatgacaatattagctaccgaaaggaaaatactgaactatgataaaatgattgaagtagacttgaccttttcaatcaagttggattccttatttacaagttgtgtgagtttctgcagatttgcatctaccgtttcttgtccagctggagagatgcctaagaagccaggacagaaatcagagaaagacaggaaatttttaaagcctttaaagctatttagattgaaagaattttgagtctacccaccctgtccagtgccccaccctccccaaaaaaggcaaagaggaaaaccattctgggtttaaaggcgaagagagggattcgaatgctctaaaactaaaccctgagcaaaacggacaaaaatttatccactaagtagacactgctaaccaagtgttctgcaattggccacaataattagtttttttttttttttgaaaaaaaaagcacagtagtcctcatttccttctcaagtttaagctattcctttctcacacccatttcaaataggtctttggtcacaactatctggatagttttctaaggcagtaactcccaaaaagttgcccaccagacatccaaagtattcagaagaacttaaaaatacaaattcctaggattgatgcctaaaagattctaatttagtaagtctggaataggacccaagattttttatctgtcaaataatcaggtttgctaaccactgctcccaagttaacacggttgaacattacttaatttcatgactcccaaactactaaccccttcctgtatacagaatacataacccaccaaaaaataataaactgtccacctaagccagctatctttataacctgtttcttaaaaggacaatttcagccaaccatcccaatagaaatttagtatctgaatcacttaagcacaaggctccactctctcaatgaagcacatcctaagtaacaggtgccctctatttactatacttccattctgatgcaatcagttttcaagtagtggaatcatggcagtgtacctcaccaaaatcaatctgctgctgatttctgttcatgcaggaaaatgctagaagcagcaggtaaaaatcatttaaagtaattgtccatttgcattaggataaatactgtttttcagcaaagacttaatacctgtggttttaaccttttagaagaaaatgacccacttcaaaggggtaatatttaaagaacaagaagaagaaacgtaaaaatccagcggaatagataaaaggcaaatatctatttatctatttaaataagaactaacatgagaataaaaatgaagtcggaaaaacacaaatccttgaagtgctataaaccactatttaaagacaatacacaaacttctaaaattaaaataagtagtggattttgcttatacatacataggagaatatgcaaacaaacattagctgaaaaagagccagcttacctccaagactaagcctaaaataactgctcaggatgtcatcacaaaagcgacagaggttggagagctgtttcagatgttcttgtagctgaactttaggaaaccgtactttgtaaagaggtgcaagaaaaccaaaaacataggcatccaaggtagaaggcctagaaataaattaaggatttttaaagcacataagacaatattaactgaaggccgggtgtggtggctcatgcctgtaatcccagtactttgggagatcaagcgggggcagatcacttgaggtcaggagttccagataagcctggccaacatggtgaaaccctgtctctactaaaaatacaaaagaagtcgggcgtggtggtgggcacctgtaaacccagctacttgggaggttgaggcaggagaattgcttgaacccaggaggcggaggttgcaatgagccaagatcatgccactgcactctagcctgggcaacaagagcaagactccatctcaaaaaaaaaaaaaaaaaaaaattaaattaaggatttttttaagcacataagaaaatactaacttgggatggtgtttaatttttttttcaaaattctcaattctgaattacacagtatagtctcttaaaaggtttactatccatttcagtttacaaaaattatgcaaccaaggttttactcattgagtagcttagactctaggagaaaatgaaattgtctttatagattcatttttactcacaaatgttagactggaggcagagtgggaacagtctgagatgttttaaattcacatatgcagcctattaagtcaatgttagattatcactggtagaaaaagtttcctataataaaagcccattaaatttttttcttgtttgttttggttttttgacatggagtttcactcttgtcacccaggctggagtgcagtggcgtgatctcagctcactgcaacctccacctcccaggttcaagcgattctcctgcctcagcctcccaagtagctgggattacaggtgcccaccaccacacccagctaattttttgtatttttagtagagatggggtttcgccatgttgggcaggttggtcttgaacttctggcctcgggtgatctgcccaactcggcctcccaaagtgctgtgattacaggtatgagccaccacaccggcctaaatcttgttttttttaagtaaaaaactcatcttttggggagataagaggacttgctttaaatagctgctcactgaatatatgtgcacaaaataccaaaatgatttttaagggaatactcacgtatctccaaagaaaaactgagatgttcccaatctgtttgatagaagatttaggcactccttggcatctctgtatatctaataaggatgaaattatatctcaaaagtagaaaagatactctaaaactacttttgaggaaggcatctctaggtaaactcaagtctgcattttatcttgtcctttctctctagggcccttgcttgaagaataatccatactatacctgtgcttccacttctcggaggtggtagaggggaggctgtcctctggtcaggagaatcctattcagtgctcccttagacattcttccaggcaggatcaaactcaaaggaaaaggaatttgtgaagcaaaccatggctttgtcacagtaaagtaattgtcactctcaacccagaatgtgtgaagctgcaaaagaagagaaaaaacactacaaggatgttcttttattaaatgaaagatcactcaatcaacatgagagtttttcataaatatctttatatgaagtgtcttcatacaaattttccagttagaatgactcaggataaaacaagattattttaaatgtgtgagttttgttgactgctatcttccaaacacccagaacaaggcctgacacatagcaggtgttcaataaacatttgttgaatgaatgaattacacccaattctatacatggagcaaaaagatccatctcccacaaagaatttccaacatgacattttattttactttgttgtttcacatactagttgaatgcctaacagaatccagtttcacagtaatatgaaggaattaagattaacatataagtaaaattttctcttaagacttttctcattggtttttttctaaacagactatgtacatttgcaactaggctactaaaatactgtaatatttaagaacactcaccactgcagggagaagcttctcttcgaggagagcaatataagccaatgtatctgccccttgttttgctgagagttcataatcagcattatatttctattaaaaaaaaataaaccaaagaaactcagaagtcaaagagcagcccaaagacagtaaaactaatcaaatcaggattcatatttttccttacaaatagcaaacgtggtattaacatgggagaaagagaaatacaaatccagtgaaacctattgcttaatgcacataaagttcttagcacagcatcacatacacaatatggtcaataaatgttacaatattaactactattattttcatgcttgttaatgacctagttcagtgcatggcatgtagtacaaacaaagcaactattatttttaacaagaaggaaacagttccaattggctgtgtttctccccaagacaaaagaaaaaaccttccaatttataaaagttcaaaatgttattgacacaatttttttaagtacagtattggcaaaacaaataacttatccattcatataaatctttacatgtttaaacattttggatacataattctctactgttaaaacatttagatacattattccataaaactgctattaagagctttttaaaaataatatagttgctagttggtgagagctcaggtgtcatgcccagcacaaaatgtgtaccaactatgtgacaaaatacacaatcctatcaataagtttaatagtgaaaatggctaattaaatctacttacatacaaatttcaataaaattcaagcaaagtttattaaaatataaactgactacctcttcatatgactttcaaatcacagaactcatgctttagagcagtgattctcaaatctatttttacatcttgtcccaggtatctccaattgtctaatgagttggcaaaaaaaaataaataaataaaataaagcccaacatgcagggatcaacaatctaccaatctacttcttcaaagtgaaccacccacctgttttcttaaaaagtttagtatttttgctggctgagaaaccatgtcgtcttcagttgtcaaaattggtacatcgcctataatcaaaaaacagtttacatacaaggacacagtgtgatttcctctgagagattccaatatcctaaaaactatagcagttgcacatttagaggggaaaaaatgagtaagcttgtcttggtttttttgctgtttcacaaagagcggttctaaagaacattttcgtttctcataatttccagtgatttcgcttgcactttgaggtattactcagaatgatcaaaccataaacaacacagagccaaggtcacggtaagaaactaaatcctcaatattatagctatatacctcacagctttaaatggaagaagaaaaaaaagagtgcagaaaggggagtgtaaaggtttacactatacctcttgaacctctccaggtgttatctatcacattgactttcaagggtgcaccagaaaatttggcataagcctgaaacagagtttgcaatcaaacattttagaccaagtgcgtaatgcaaagctgcagagcagctttacttcacagccccatcccccaaaggcagaaggcgactgatactgaggccgcatccctccccgtgatctcaagtagggacgcgggcgccagccacccggctttcgaggactttgctccccaaaaggtcctggggatgcagagtagggagggcgcgccccttgcttcggggtttcactccaccgcccagacagctttgtgaggcggacaaaactcggagccaagcggagaagccttgatgtcgccgccggccttcggcgggggtatcggccaggttgggactcgtcggtgggagggagcccagggcaatgcagcgtgcagcggctcggccctcctggaccccgcagcgcagcgggaaactggggcaagtcagcctggcgcctccagccccgccccttcctcctgcgccctggcccgcgaggcggcctcaccatcaccaccagggactcgctgtgaaccgatgggagtccccagccgcctccccagcaactgagttccaagggggccgccatcttgcgcgggccgacctttactatcccggaagtacttttcctcctaatttccggcacgtgaaacgcgggggcgtggctaagggagggaagggtaatttgggggctcttgagagatgagagaaacaacgactggagggattaagaagaactcttaggagcagcttggcctaaagggtaagagttgtgtgccttaagtcagacccaccagtaattcttcaaatattaatatttattagatccctagagtgttccaaaccctttgaacattaaatctgtgtgatgcctaaattaacctgtttgtaaaacagggatgacccagtatttacaagattgtggtatttacaatgtcggagagaaagaacttggcacacaggaggcactcagtaattgttcaaccccttctcccatgtatgtggcctctgcctgcctttccagcctcaacctgttctcaccctcatgttcactggcacaaccctgcttaaaagttacagtatttctgaacgtcaggtaaattgtgcccaccttcagtgctggtccttcaatctggaatatctttcttccctatgcagctgctccctcaaaaatgagcttaactcaccttccctgtgatgtttttacaaagttaggagctctgggttcttgtagccccttgtgcatatttgaattgtagcttctctccctagctacagaccttttgcctttcacagaagagggctagcttcataggtttgggacctgtgcagccacacaaggctctgtgcttaaaaaggctcctcatttggctgatgctcttccgtcactgtcttgaaattcttaagttttgaacaaggggctctgcatttttattttggactgggcccctcaaatcatgtagctcgtcatgtctgtgggcctaatgagcacagactaaatgtttcttgacgttaaacctgacagtttctcagaaaaactattaaagaggaaattttggtcttggaaatgctatgatccaaacatatgactgggtctcagagttagaacttgggtgctgggtcttttttctagaaggcacagtagtctttctgggacaccctcgcagtcatgcctctgagttctttcctctattccactgagatggtcggatcttcttaactaaaactcaaaagaaacctctgcaacttttcgtaaaattactattcaacaaatatttgctaggcactcccttactgtttacataatcattcaaattacagtgccagcctgctaaagtcttttttacatgtttcaaaaccaagagttctaagaaatgaaaaagagatatgtcagaaatgagaattcattaataataactgtataattggaaaatgcataacatatgtaccattaaaactgtcgaaacatttattgagcagctcctatgtcttagacatcataaggttctggaacaatacagaaatatataaaacatgaattctgtcctcgggagtttacagtgcacaaaggagatatacacacaccaaggtgtaacaagtcagataatcacgagtagggttagaaatataagcaaaatactacagaaacacaaaggagggacagtgcatcctctgtgtgatcagtggagactatctgttgagtcttcagtataaagaaagtaaagtaattcaactttcagattgtaatggaacctccctgttttgagggttagaaatgtcaaaccatagactgacaaaggcaaggcagggggaaagaaaatcctaagccataaagctgagggtccatatactacattcaggcatttaaaacaatcatacagaaagaatgtggatttcctgagccttgtttgtagcaggactgagaggagtgaatgaacattcttagtggacacataacacagttactcagtttggccttcttccgtactgctgctactacatacagtgatttcatttgcattaaagagaaattaaatctcttcccttagtgttgaattgagacagaatagcatgtcattgcatctgatgaaagaatccttacacacaggtttattagtgcatagataatagcaatcttttattgctgcagttcctcttgagagtctgtatctgttagattgaatttaaaaaactctaacatagctgattgcacaaacaggctgaatactgttccagagaaccacacagaaaattgaagccttcagaaattatgcctggtatggttagttggctcctgtgccttttcctggctgttttagagtattgttcagagttcatctaaatcataacttcagattcctaccgggaagaatactgtctgcaaaacatccatgtttgtgtgggatggcctgaatcacagctttataatgagtatcccagacagtgttttccccaaaaaagaaatcttatttttcaaaagatgatcattaagaatggtttcatctggtgatagtcatctgaactcaggcaacctgaccttggcatccatacccatccttcatgtgtttcttaacttgggagccacagtgcaaggtttgttaggctctttttgtctgggtgattaagaatctgggaaatggtgctgttgggaaagatgaaaggtttgtgacaaatgatggtacagtatatggtcccttatgggaaaattaaattgtaaagtcttaaatatccctttgaacttgaagattctgtaatttgtgttcagatataaaatccttaaggaggggaaagaacaaacactgaatagaaaaaaggagagctgagttcttgacttggcctctgattagccatatgcgcttgggccaatcattttacattgatacctctgctcattcatttataaagcaaaagttcttttatctctgagatgctatcattttatgtgtaatgaacatttaataatttctgacatttatggagcaatttctacatgccagaagttgtttcaagtatctaacataacttgctttatctccataatgatttcatgacacaggtaccttcctaaggttaactaacatctttgtgtccctccttgaaaatagaagaaaatatcagtacccatatagccagtaggtggtagaaccaagatttgaacccaggcagttttggcttcagagtttatactcttaaccactgtgtcatactgcctcatgtagcctcctgtgtagtccattaaaaagcccagtttcacccaaagtggagatatcaatgccatgatattattgttattatttatgtaaataatatttgtttagtattacaccattaaacgaattcattaagcagcttctgtatgcctagcacactgcaagcctgtcagggaataaaaatttatgttcgcctgtaatcctagcactttgggagggaggatcacttgaacccaggagttcaagacaagcttggacaacatgatgaaaccttgtctcaacagaaacacaaaaattatagctgggcatgatggtgtgtgcctatagtctcagctacttgggaggctgaggcgggaggatggcttgagcccaggaggagaagattgcagtgagccgtgattgtgcaaaaacttatgttcaagcttttagaggcacagttgatgaaacaaggcccacatatttgaactaactagagactattaggaagtaccattttgtcaagaagacaagtctagtatggttttagacaaaggcttgaatgtactgcaatgcttggcaaaggcctaatgaaagaagatgatagctgatctcgaagggtgggtacgttgcatttagattggcacagagtaaggcattgcatatgggctgtgctatataagtgaaggcatagaaacaggactgactatggcaaggaatctgaagatgagtaaacgaatgctgggtttggttataagctggagactgctcagggagagtattggttgactaacttgagaaccagaattggaaggcatgggaatttatagttttgagaaagtaaagacaagtaaaagtccaaatacaatattagtggatttacatagtcaaggatgggaggtagacagctattgttacatggacattataagaagaagcattttataaacccataaactatattaaataaagtaaaagtgtggtggaaaatgctgctgaatattattggaggaaggtcacttggcacccttccgctgagcatttttgatagaggaggttgttagaaatccagtggcaagggattactggagaaaagggtataaacgataaggacaggtctaagagcatgaggaatatgactgataaaggaagaagagaaatgggacaggactgaaagactcaaagtttttgaaagagacgacatggtgaatctacacacatatgaggacaaaattggctattatgagtaaaagtctgaagatgctggagagaagaaggatgggatcctagaaattgccctaagagttgaggctgagatccggagcttgagcagcggggctggcaggcattgaaaatgagagacatgctctctttctgacactggaggaagtttcaaggggaactatgggatgctgagtagataaatcagttaccttcaaatttccctattacattagaaaaaaaataaaagtgcctgagagaaagagattggggctttaaaaagacagctgggcacagtggctcacacctgtaatcccagaattttgggaggccaaggcaggcagaccacttgaggatcacttgaggtcaggagttccagaccagcctggccaacatggtaaaacacaatctctactaaaaaaaaaaaaaaattagctggatgtggtggcgcacacctgtaatcccagctactcaggaggctgaggcaagacagtcgcttgaacccaggtggcagaggttgcagtgagctaagatcgtaccactgcactccagcctgggcaacagagtgactctgtcacacatacacacaaaaaaaaaggcggaataatttagagactatatcaggggttaataaaaagtaaatgggagcattgctgacagtcgtaaaggtcaaatgtaaattagtattaaggcgataaatcaagggagagccatgggcaggctaatgattaggtgcctctttaaacagatattctttaaatattcattcagtttttttaaatggaaataaagttggccccagaatgtaacaagatcaatttatattttaccaattattttaaaagttttatttggaaatccggattttagtaccacttaaaagttggtcctgaggatgatagaagagggatggtaccctaggagttgccccaggaattgaaagaagatgaactctgtagcttcagcatgatgggggctcagccatcctgacgtctagctaaatttgtacagttgtgtggcttcctctaaagatactttgttacccagaagcataaaaagccaagttcatgtatttggtagctatgtgaaggtgatcaggcagtaatatatactgatagggattcattttgctcctccagcatagtaaacctgctgtcttttgtatgaaaaagaattaaatgaaaccaaaatgagaatattataatctgacattgtgctgaatttatgttgaggaaataggacaattatacttaaaaaatgaggtttgtaaagggtcctaggtggaaataaggaccttataatggaagtaaataatggaaataacggaagccttatttctatacttcactcaaagtggtaaaacctaatataccaatagactgtgatgttaaatatgtatattataatactgagagtagccactaagagaactatacaagtgatatactcaaaaatactaaataaatcaaaatagtttttttttttttttttaagtccaagtaacccacaagaaagcaaggggccagcaggggagtgataggttggaagtggggaggtagtcagagagatgagaagttgagaataaacagaaaacaggtaacaaaatggcaggcttaaatcctaaaataccaagacttattctaaatgtaaagttgatctcaatacaccaattaaaagacagaaattggcagagtggataaaaaacctaagctaaatgtatgctgtccctcagaaacttccttcaaacatgacattggtagatggaacctaaaaggatggaaaagttataccatgcaaacattgatcaggaaaaaaaaagtagtatgcgtgtatgtgtgtgtgtgtgtgtatatatgaaggacattacataatgataaatggatcagtccacaagacaacatattaatcccaaatgtgtgcaccaaacaacagtgcttcaaaatacatgaagcaaaaactgatagaggtgaaagaagaaatagacaaatccataattttaactataacataagctatagttatacccgacactcagcaattgatagaactactggacaaaaaataagcaaagatatagatgaattaaacaacaggatctaatagacatttatggaatgccccacccagtgacagcagaacatacattatttttaagagcctatataacattcaccaaagtaggctattatgagtcataaagcaaacctcaacaaaagtttttaatgaaataatgcagaatatattacttgactgtgctggaattaaactagaagtcaataacagaaagataacagtaaaatctccaaaaacttggaaattaacatacttctacgtaatcagtgggtcagagaggaagtgtcaacagaaaagaaatatatacaattgataataaaaatacaacatttcctattaagagaatgacaagaagccacagactgggagaaaaaaatttgcaaaacatatatctgttaaaggacttgggtccaaaacatacaaataactcttaaaacttacaacaagaaaacaacccaatcatactggattaggatagactgcaaatccagtgattggtaactgatatggtttggatttgtgtccctgcccaaatcacatgtcgaattgtaatccccactgttggaggaggggcctaatgggaggtgattggatcaaggagggattccacccttactgttctcataataatgagttctcatgagtcctggttgtttgaacatgtgtcgcatctcccctttctctctcttcctcctgctccagctgtgtgggacgtgcctgctttgccttcgccttccaccatgatcgtaagttttctgagaccccctcagccatgtttcctgtagagcctgtggagttgtgagtcaattaaacctcttttcttcataaattacccagtttcaggtattcctttgtagcaatgtgataacagcctaataaaggtgaccttataaggaaaaagagacatagcaacacagacgtagacccagacccaaaattggtgaaatctgaatgaactctgtggtttgtaccaatgtcattttcatgattttaatatcgtacaatagttacagtagatgttacaattgggggaaacatccctgtacatttattttacaacttcctgtgagtctatacttaattgaaattagatgtttttaaaaagaattaaaggtaatgtaatggcatgtgatgcaaaaaatgggcacatgaaatatccagagcattcaaccagatggcagctaaaaatgtggaccatctgccttcatggaactttgtatttcggacatcttttcatcagcaagaccatgccatttaaatgttttcccagaagtgatgctgagctatgttcagtggccacatggctctctagaatcagtaacaatgaataaggatggacagccgggagtaaagatgctctccaggaaatcatcttaggactgggtaaccccactacacccctgggattcagtcaaccttggaaatcactggaatccttaatataaactacaaacaatccagcattctctgtttggctaaagatacatttcaaagttttctttaagaaaaaaaagcaatatattaaaacgctttgtttgaatatatgtatatttgctggatcaatagttcttacagccatattactaaaattaagggctatggcataataagaattactataattctaaacccattaacagtttatagcttatccatttcttatactatccctgtgaggaataattatatcaagctttatttgtttacaccaaacaggaaaaaatagatgtatttattcatatttcctccattggattagccaagtctactagggagcaaaaatagtaaattcacatgcctcctttttttatggtagtaattgaaaaagttatggatatgatcccattttctgaaatgtttaaaaatgagtgtataaaatgatcttattttcagaacttaagtcattatgtgtattgtttatagggagttatattacttttccagattaataggctgccatcgataatgaagaacaaataaatcctgccttgtgaaatgctgccattttaaaatttgcctgaggaaagattcattattggaggattctttgctttatacataaatcgctttaaacagcaaagtctcctagcatttaaaaatagtccatatataaaaattctctcaatccacaatcatgtcagttgtgtaaaatgagatatatctggtctgatacctcagtttatggaaattcctcttgaaatgtcagtcattactcacatcagtgctttaaatgccatcttagcaaactaaaagaaattagcgtacattttgagtaatggaagtgagttaggaagaggaaagaacagggtccaatgagtttgaaatggtgtttacagttgggtattgttcatagcttttggaactgtcttgcttcccctattcatcaaggtgctgaggcaacaacattaaaatcaacccaagaagtatactgagtaggtatatgggagaatggcatattaacttcttgataaaatgtctcagtatgtaaatacttatgaattattattaatttatattactgtacttacaccatttgattacacctgcataaagctgcatactcatttttacttcaaatgcaggaactaactcttatatcccccacagcatttagttggcacataatagatgcttatagttgatggacacaaaacatattcaactattacaagaacagaacttttattgcttcttcagtttcaaatgtctcaaagttaccctttgcttttgaccacaaagtctacccctccttatggtagtttcctcaggtgtctgtgtcctctctttccattgcattttcttctcccacatctacccagtaactggagtcttcctccttttgctgccccttgactacaaggcatttccatcttttggcttcctaatatgtcatgccttctgttattgccaccacagccttccatttcccagctctcatttccatcctagggatgggacagtaaggctgtcatgaataagcataatttatatgcctttttctccatttgttggtatggataattaagtgaccttcaactttcattcaaggttaatcatagcgctgaaaaccaaaaggataagatgagagtgagcaaatcaagtccagagaggtgtatttccagtgtggaacagtaactcagtgtaaatatccaggagagaggcttccaagagagcgtatgtgtgtgcactggtgaggggaggaagggttacgggcgggaattgtggtagaagcttcctgaggccaaagaaaacattcccagagggtctctattttaaagaaaagattttctttctctgattttttttatatgtagatgtcttcattatatatttggacctgtttttaaaacagcttagttttagatttattcttcgagataacttgtacctatggacatcaccaacagcttacaaaaattagaccagttgactctcaataagacttctcacctgatccatgagcatcatctctttatttggatttcataagccagatgatatcttaaaattggcaaatataattacaactccgttgaacatatttttctccagaaaatgttttgagtacaaaaacgacatctagaggtgactgtcaatatatcttttctttgcacgtactacatatttgttgccgtgttttagaaatattttagaagtttgggtaacagaaccggcagtggcatttattgaattcttcctcacaataactgaagggatagtattatactcgttttgcagatataaccctttcaatccaactaatatttattaagtttactaaatgctggcaccagtgataccaagatcaatcagatgtagctcttgttactgaatggcgtacatggaggagataaacacagtaacgtccactcttgtgtggtgagtgctgttggagattaattaagtgttatgaggttatagaagaggaattattcacccatctgcagagggcttggggatgaaacagtgtcagtgaagcactcctggaggaggtgtaccaggggaggtgttccagacagaaaacagctgaagtaaaaacatggaatagagcaatagtatattgtggtctgagaactacgtataattcaacatttcaggagggtaaagtgagcggtagataatgatgagaaataagactgcaggcacagtcagaggcctatttacccacacaaaggaatttggagttggaggcaccaagggtaaatatcttgtttcaaaaagtgattacatgaggatttttgcccagttctgtttgtctccaaagccatgatttttacattaaaccatatttacttcatagacattcttcaaattaaccatttaccaaagatgtaaataagttataagaagaaaaacaatactaatttggaagataataaaagcattatttggaaaaagccagtgtagtatctctattttcaatttgaactttgagtccaatgattagacattttctagtcccatattttataccataccatgcagtctgcttttgttaactatcattaatagtgaaatgacaaactgaccagcatctaatactggggttacactggtgggtaccctacaacaggcgttttgttctttggtatctaaccactaccttcagtagctgcctgacaaagatgtgaatctgaggccacactacctcaagggcacctctaccaagacacatctgctgggcctaatgaaaacagaggtttctcctagccctagcattggagactgacataccctcaatggatgtcaggggagacccagtcactaaggatgactctcctgcccctaacccattagcatgtcccaaaaagaaacaggagaccaaagacctttgccttgtataacagtcatgctgcctcggaaaagctgggaagtcccctcccagtgaccccatgctctatcctaatgtgaacgatgttcatgctttttcatcaaatcttttaaatagaaagggtgcagagaaagtcaactgtaatcacttggtgcagagtgcagggagagagagcatttcatattcaagaagaaattgtccaagcagtaaatggcattgtggtgagtcctgtaattggagatagtagagaaacactggacagctgaggaaactccagaagggagaaaaaaaaaaaaaaaaaggaaaacctaagaacaaaataaaagagtctaaaatttacacagaatcagaaaaagacttctgaacaaaatagcattgatggtgctgggaaacttaattagtgcataccccttacagcaggaggtgggtagaggaactgttatgttaacgaaagatcatttgaaaaaaaaaaaaacaaaaacatgttgtctttctctttaaaattttaactaaattccctgattcttaacagaacagggaatatacatttttcactaaggaacaagtgtgttttcttaaaattccatattatgatctgttacaggtgagtgggtggcaagtagaatattgtggttaactcctgggatggagaaagggtaggggaatcgatattattaagagagggatataggagaggcttcagtaatttgcagtttgaatactgcaaacttaagtagtaggaactaatgtttctggagttattccttatacctttataaatgcctaaatactacaaacatttcataaacttttaaaagtgaattggagattcgggcaatatttagggaaatgagagggcgcaagaaagagatcagaggggcagaggatgagaagaagaggagaagtaagtagggagagagagaaaaagggaaggaatggttttgaacctagtgagcttttggaagggttaggttagaggtcacatcatgctgttttccttatcaattcttaccctgattgagtagctctctacctgtttctcaccaaatggttcaagcagctgccatggtattctcatctctacttcccagccacaaaacagctccagccaacataaagcagttcttccagtagaaaaaagaaaaaaagagcacctgcaattccctcaagaagaaaagaacaaaaacaatgagtatatatgtatgaatgaacctaaagcagctctaaactactcccctttggggacagaagcagatgccttcgccaaattcaaaatgaaatcccatatctctgaagacccccttcttatgttactgtataatttacatgcaagttgtctgcatagttaatcgtcctctatagcatctggtatttatcatcaaaagccgcttgttgagaggttctggagaagctcttcatgtatcccgggttttaaacatttttctacaagtctgtttctttaaaattaaaagtgtagctgagcacagcgaggatctggtagtaagtagtagggagggtcattcatacttgggatgttgctaatgtgacctgcatgattcagggccagagaggtgaatgaagataaagggaactaagcgttacagccaaaagggttctgaaaatctcctagtcagattcctcagtttccacatttgacagtagctttcgcagggaaccccatccaccatgactgagctgaaactagaagccaggtttttcaggtgtcattcagggttgatttagggttttggttttctcctgcaaaatggagaaaatgggaaaattttagattatccatgttagaaggatgatgaatgtgtgtaaatgatattgttcagattctgtgagtgggaccagcaccatattggactggcctagggaagtcaggattctgccttctaggtaggtgctcccatctgttggtgacctggaacatctctctgtgttcattctggagatgcagatctgggtcccgcagactcagacctttgcaggacactagggtggccccttgttgcttctcatctgctatagtctcctgccactgtggcctacgggtttgatttagaaattcaggaaagactagaagcaagcaaacagataaaaggttagtgaagtgtttatccactagagcaaagccacaacttttcgtattatttagctcttattattctaaattttaaattgttttttattgtttcacttaccatgtgtaactttcacttttcaattacacatggcaagtgaaagaataaaaaacaatttatttattttttatttttattttattttttgagacagagtcacgctctgtcacccagggtggagtgcagtggcgtgatcttggctcactgcaacctccgcctcccgggttcaagtgattctcctgcctcagcctcctgaatagctgggattacaggcacccaccaccacacccggctaatttttgtatttttagtagagagggggtttcgccatgttacccaggctggtctcaaacttttgacttcaggtgatccaccctccttggcctcccaaagtcttgggattataggcatgagccaccacgcccagccaaaaaaaacaaaacaaaacaaaaaactaaaatttagaataataataagagctcagaaaatgacagtaattaaacaaaggtcacacggaaaagttgcccttgatatatcttgggacagggtgggttttccttattgttcttagctccttttgttaatgtttattttagtgccttaatgctactaaacagaaaattcagaaaacattgtagatgtcttccttttacgctaatattctccagcttttcatacatttgcaaaaagaaatagattatggatttctcaaggtttagccgcttgttatttccgtgtgtaatacaaataagcatagttaaaggttaatttaattagcaaatttgcagttatctgaattaagtgtactccaaatttagtttacaagacctgacaagtttgtgaataagttaattcacttctaatgtattttaatatacccaaaccacaaagcatcttaaactttgtaaaaagagtgtgcacggaggaatgagcactagatgtgaattctagagaactggggtccaggctctgctgtgtattggcctgagcagttcacttaacttccctgagtcttggtgtcctgttttgtataaaggggaacctgatccctcttctgcctggctggcagagcactgtgagactctggagaaatgacatatgttagagatgtttataacctggaacacggtacacggtatgttttgtttgtggcattttttttttttttttttttttgagacggagtctcactctgtcgcccaggctggagtgcagtggcgcgatctcggctcactgcaacctctgcctctcaggttcaagcaattctcctgcctcagcctcccaagcagctgggactacaggtgtgcgccatcatgcccagctaatttttgtatctttagtagacatggggtttcaccatgttggccaggatggtctcgatctcttgacctcgtgatccactttcctcagcctcccaaagtactgggattacaaacgtgaaccaccatgcccggcctgtggcattgtttttaaactaaagcatgtattatagttttcctgaaaagtaaagatttccagaaaaggaattgggaaactcttttaccctcatagttataaaatatggaggtttccttcctccaggttggtcagcttccctcttgatatggtttggctttgtgtccccacccaaatctcatttgaattgtactcccataattcccacatgttgtgggagggacctggtaggagaatcatgggggtgctttcccctgtactgttctcatggtagtgaataagtttcacaagatctgatagttttatcagggatttccgcttttgtgtcgtcattctctctttgcctgctgccatccatgtaagaggagacttgctcctttttgccttctgccatgattgtgaggcttccccagccatgtggaactgtaagtccaattaaacctctttgttttgtaaattgcccatcagcagcgtgaaaatggactaatacacctctgctctagttctttttggaactaggcctcttccctttggttgtcttgccactcactgtcagattggacacttctccacactggacctcaacatcaccctgctggcagtcccacaggagttaaaatgtctgaagagggaatggcccaaaaaggagtctcactgccattgcaagagctggtttagaataaagggggcagggtggatgatgaaggattacttaatgggtacaatgtatgttatttgagtgatggatactctaaaagccctgacttccccaatatgcaatctatgcatgtaacaaaattacacttataccccatatatttatacaaataaaaaggaattttaaaaaagaataaaggggtatgctgttcattcatttaataaacatgtattgagcaccaactatgtgccaggcactcttctagatgcctgaggtgcataaatgaacaaagtggacaaaaattccttcccttgtggagcttacactcaagaatatgagaccaaggagatacagtctcagaaggagcagagacaaggaagagtcaatgatgcccagtgaacaatgggataaagcttaggagtgttcatcctcattcataattccatagcccataaacgtgcagacccagacttgaccataatgtgactagatactaacagggagtaattaagtttatttttttcatatgaatttcacagacatatacaatagcatggttaaaagaactaaattaattttatggtagtaattttttccaactctgatattttgtgtcagctcctacttgtcccagccatgcctatctgtggtctgcgggccttcaaagggcagcctttgtgttgcccaaagccagcacagtggtgctttgtgcaggggcatccctgtgcctcctggaattcgtctgccccatgaagctaggtggctggtgttcgtggccagtcctctaagaagcaggtgtccccactaccgtccaccatgtgtgtcctgtctgcagaacgtggctactactcagatcctgtttctcactcaagttctacctcaaggctcgcactctgtcaagtgatgtacttcttggggtccatctgcctcgggggtggaaattgtgaatagaactgtagcccagagaatcattgagagactaggtataagccagtggcagaacctcaaccaaaatgccgggcttgtgacccctagccctgggctcgtgcacataacacacagtgctctgaaatatcattgtttggggcattattgtcacttttcttctactgatgtggatggcatgttggattttatgaatatcaattattcagattcttctcaaatagtaattagttggttttgagagtaattaaggcaatagatgctcctacaagaaaagagaatgaaagaccctgatttgtgtatttggggtaagatcttacaacaaactgggcccaggtctggaataaatgtggacaacttctagcacagcataaaagcattaaaaagtttattaacacatcatgtcggtgtcaatgaaaatcaaattggtataattttcaaagaagaaactaatgatactttaaggctgtgtttatagtaatactatctttctgaaagatactttgtttatgtactatattaacatagaaaaatagtaagcagtttccagctacaatcagtggtttaaattaagatgtaaatgtgggtctaccagtgagaaactaaggcaaatgtctccatctaagacagagttgccagataaaatataagatgatgcccacttaaatttgaatttcatatgaataacaggtaattttttcttataagtaaaaatttcaagcttaaccgggcttcccacattattgtttttttttaattttgttttgagatggagtctcactctgtcgcccaggctggagtgcagtgacacgatctcgactcactggcttcccacatttttatttgttaagtatggcaactataatctaaaggacaaaatttgcttccaaacactgcccctgaataagatccaaagtacatatgatagccaattaatttggaaaatacctcaatacaatttcaaatctcacagaggcagggtttctcaacattggcactattgattttggggcagttaattctttgttgtgaggggctctcgtacattgttcaatgcttaacagcacccctcgcctctaccaccagatgccagtagcataccctggttgtgacaaccaaaaatgtctagacattgtcagatgtctggtggggagggggtcacaaaatcatccctgggtgaggacccctgttctgagggaagaagcttatttataagtacagtatatgtattaatatcttagtagaaaactaacttgtcctgatcttgaagaaagaagaggaaagccatattttatgtagcctttattttaaaatatcatgggagaagcaccaatggaaatggctgaggaactagagagctggtagacgtgggattattttgcagtctgaggctctatgacagaagcttctgtttgctccagcagctttgagagaaaaaggcagtagaaagtactcatgacacggctcaggttcccaatatagacttcatccaaggctttgaaagaacagttagtacagagtctgctgatttctggaaaaggagtgttttatttggatagcaataactgaaattccaacctagaccacctagctgaataattatatgtgtgtgtccaaaaaacaaattgccaagagatgcattgagaatcagaataggaaaactgtttactgtttgatttttcagaaaataattcaacagggaattttgctaaagtgttgttccttctattttacccaagaaaacatatgaatttattttgctgtctaaaccaagaaactaatgtggttatacatattatggggaagtttttaaggaattaacgtttagagtctttgtggctctaattactgctcttcggttgtgtagtgagagtcactaagcattccttcctccaaggaatttccagcataatcctgttttccactcaaattctttgtgattgccagattggagtgaaaaatcaaatctacttccaatgaagaaaaactcaaaaaaaaaacagtgattcaaacaagtttccaaagagaatacatgaacttcttattctgcctttattaattgacatctacaattttgtatttttctcaggataatgcaaaaaaaattcttttgaatcattctcactaaatttaggggccaagtgtcctagctatattgttttttaaaaaaagttatgttaaagcagccagacttggtggctcaagcctgtaatcccagcactttgggaggaggaagcaagaggattgcttgaagccaggagttcaagaccagcccaggcaacatagtgagaccctgtttctacccacaccctaccccctaaaaaaaattagctggatgtgcctgtagtcccagctactcaagaggctgaagcaggaggattgcttgagcccagaagttgaaggctgcaatgaaccatgattggaccactgcactgacaaagcaactcagttctgatctacagttcattcttggataaacataatacacaacacctagaaatacagcaaaaacccattacccttaagacaaagtccagaatccttactgcagtctacaaggtcctaaattatctgattggagcagactacactttccccaactccaagttatatgctaagctgctctaagttagagatcaaaaaaatagagtggctcaaatgagatcaaagttgataattctctcacctaccagggtagaagtatgcagtggtcagtggttcagagtttgtggaaagtttgatccatgaagccatctaaataaggtactttgacccaagtactttctatcttgttgcttcccaccctttaagacattctcctcatccacatggtcaaagctcactcaccactaccctcactctgtcccaatctgtagaaaggtaggcagagaggccagcaaatagctttcttttaaatttgtgttgctgggtgggtcccccaggaaacagactctgagatggagattagtgtacaggaagttcactatggggtgctccatgaattatcacccactggaggaaaggaaggaagcagaactgggaagatggaaaagttaagctgcagtacagtcacaacaaggtctcatccaaattgatacggggcgttgaagctgagctggtccttcagagctgggatgagaccagatattggctgcaagccattccaggaaagggatgtgaccttgaatgagatgacttttcttagctgaggcaattctcaaagggagctgtcagccagtagccttgcagttggacagatggcagcacagcagagcatctgggacaggatgtgacctggaaatagcattgatatggtttggctgtgtccccaccccaatctcatcttgaattcccatgtgttgtgggagaaatccagtgggaggtaattgaatcatgggggaaggtctttcccatgctattcttgtgatagtgaataagtctcatgagacctgacagttttaaaagggggaatttccctgcacactttctctctttgcctgctgccatccatgtaagacgtgacttgcttctccttgccttctgccaagattgtgaggcttccccagccacgtggaactgcaagtccattaaacgtctttcttttgtaaattacccagtcccatgtatgtctttatcagcagcatgagaacagactaatacaagggtaaaccacttccattcacccctcattatctagaatgtctagaacagccaccatagttgccacggaggctgggaaatacagtctctagctaggaggccctatgcctagctagcactaaaaggaagaagggagaagggatactggggagcaatcacaagagggaaggaaaatcattctttgatttgttcagcttattgactgttgtagatcaaaaaccacttcattgaggaaagcaacccaccaaacacagaagcagaaagagagctaaaaatgggataagaacaactgagaaactgcttatccagtaatatattttaaatagtgaggactacaccaaacttaggtaggcttcagaatgagccagggacaactccccagaactctgcaggaaggggctcctgaggacacacgtccaacctgcacctgaaaccccaagtcacaaggacaactgatatttagatgcttttcttcctaagacctgctacatatcagaaaaagtcacttaaggtaaaagataaaatatgctgagaaacgattctgtttcttaaaaaaaaagaaaaaaaagaaagaaagaaacccaaacagtaattgtattgacccaagaaagcactattaaaatgtatcactttctgttagtgttgcttggattttcaacataataatgttctgtttaaaagaaggagaccaaagtatgcttattacctgaatgacagaatattctgtgcaccaaacccccatgacatgcaatttccctttatataacaaacctccatgtgtacccctgaacctaaaataaaaattaataaataaataaaatttaaaagtaaaaataaaaataaaggaaggagaccaagaaatacttaagggcccactccccttctttctgaacaaaatagccagaccagcctctgccactgattgaaccagggattggaaactaacataaagcagccaccacctctaggatgagcataagattatcagtagcctgtgaggaaacttggtaataaaactctgactggtagtgacactgtatgaggtagtgtgggcatctaaccaaccaatgtggtggtcctcttgtggacaggagagggtatgtggtgtgtacaacaggaaaaacacattaaaactctagaaacccaaacagagggagtaggaggggccataaaatgtctgacttctcaaatggctgatgagctcctagaggtgtccttggtctcttccccagaggcaaatttcaactagaggttgaagctaagaagcttatcaagactcagggcttctcacttttcccctcacaggcccactccaaggctctgatttcctgggctctctttgccttggcttcctggccatcagtgtccatcacttgagacaatctgagtgtccccacaccaaacacctgaaatacacctaataagaaagcctcatcccatctgcaaagtatgctggaactaagatccagattcacaactcaggaaatttcactctacttaagtagtggcattctatcttcagattaaagtgtgtttgaaaatctctacccctactgactggggctgtcacacgaggtcccacttggccccgtcttgggactctcctgcacagcacttgactctgctagacatcctctctcctctcccctgtgccctcatccccatcatctcccagaaactcagtgctggaacacatgagacttctcagctgcatatcggcaaggccaagggatcctcaaaacaaggcaagtttctgccctctcccgccatcaaaagtgtgtaatttctttgttttgttttttgttttttgttttgttttgttttgttttttgacacagagtctcgctctgtcacccaggctggagtgcaatggcgcaatcttggctcactgcaacctctgcctcctgttttcaagtgattctcctgcctcagcctcccaagtagctgggattacaggtgcccaccactacgcctgcctaatttttctatttttagtagaaacaggtttcaccatgttggtcaggctggtctcgaactcccgacctcaggtgatctgcctacctcagcctcccaaagtgctgggattacaggcatgagccaccatgcctggccaaatgtgtgtaatttcttaaacccaaaggggtctagccaggatcctgcattgtcatattttaagaataaagtgatatctccatgaagggccccactttgagtcctatttatgtttgcctctgggatttagctgtagctgggcatgtgtgatagtgggtaggtgacagcctgcccagggtatatttgcaccctggccatgtagcatggggttgagaaagcaggctccagtattccacaggtctgggtttaaaccccagctctaccatttattaggtttgtggccctggaagagtctgtatcccctctaagacttcatctcctcgtttgtaaaatagagatataataatactttcacaaggctattgtgagaattaaatgatgtataattcgttcttggcatagggcctaaaacgtagtaagcactgataaatgacagttctaatagtagataccccataactaagcgtctttgaaggaagtttaccataaggtaagaagaaagtcaacttgatccagtaacaaaaccccagaaggagagattccagacatagcttggagcccagctcttggctatgtctccttgcccagcttgcctgttattcatcactgagtcccatgtagaggtgggattgtaagtaaattgtgaaaagaatggtttcagtaaaaactccttaaggctttgggatacagcacagtgttgtcttgataccaccaccaccacttcctacaatacatatgtcccacctaaccaggaaagagataacgtctcaaactttgctttaaatgctgcccagctttggaatctcacagtgtccaaagcatcagaggatactcaatggatgtaacggtggcctccaacagatatgaccatggtcttcaggtgatgtgccaatggtatgtagtagacacagctctggttcccaacagaggtactgatgattccagcagtcatgacagtggtccctcgcagatgtggtgggatctctggaacaagcagaataatgttctgtggatacagcaggacccttggaagcatcaacattctcagactgattgagatgttagggagttcagatatctcttaggctcagcaaaagtggtactcgagcccaaggatgtggtgttagccagtagttgggggaagagagggagaaagtgtctgataccatggagtagctgcaggtatttatttatgaccatgtgtgggttatagcccaaggtacagacatttggggtatgaggaatgtgaagaagagactttgaattggacaagagtgaggaaaatagccaaggaactatggagtatacttctattacctggggtcaccataagcataaaactaagagcttcatttacagccctgtatttcaatgagaaagtggaaagagcaccggaccagcagtctggagaaccaggtgttaatccaagtctgtcacttaatttcttcaaaccttattgtgtatagaaaggaggaaaaagagtagcactcaataactgacgtcttttctttgataattttatttcatcactaccagattcagataaagccaaagtcttgctaacactccttgccagttgaaatgtggtgactctcaaaaacttggaaatgtcaccattctggtaagaaatcttttaatggaaactttacatcttctaaaataattaacattcagtactcaaccttagaacattttccaaatttagatgagaagagatgaagcaaggaaaaaaggtgtaaccctatcatacttttccttttggcgttgaaataaatatccagttaggggatggggaaagttttggtttctttagtactgagttggtggcagcaagagctaagtaggggctgagcatctcaggtatgggcttcccttagatgatccagctatcaggttctgccaaggtgagtatgcccttgtggggcttgcaaggcctagtcatggtgggagaccctctataaaggcctacaagtacttagggaggtaagaggacaccccctcaagggctgaagcctgtctcacctttgagggcagtgagatcaccagtatccctgtgagctgtataacaggaaggataagtccatgttctggtgccgatccctatgccttttggaacatttctccctctgataagaaacctccttataatactttgtttcactggaacaacatcatcctcatcattagtaaaatgattgctggttgtcaacattcacggagaaggtccctggggaaggtcagctgttgcagggaagactggcatgctggctcccaaggcaagtgttcctttccatgatgaaggcaccagggaccagggtcaggccttcagtctcagagatgcagaaactcttgtcagtgcctgaaagaagctgaagaataataagcagactgccaatgttgtcattaaaaggcaaggtatcttttacgaggtgagcattagcatcagcctggcaagtacattcttagacaaactgcacggaagccaatttaacagaaagttgcttggcaagcaacaagggtgatgtttaatggggtcagcctataattacatgatgcatccatttccaccatgtgtttctgtctgcctcttggaccagaagggctgtctttggggccaggaagacccttccctggacagtattcacgcatctactgccagactttgcctcactgactcttcctgtgtcacacattcccaaacctcaatgactcaccaattccctttctgattgacatggtcttgccttaaacgtgttgatgtctttaatcaagacagattaaagtgaagtttcttttttctggaagatgtgactgcatactgttttgaccgattatatgtgctcagctggcaaagggctatgtcccttcatagcctaattcttggggtcaccccattgttgccttcctcccatataacacctacactgtagtgttgaaatgtcatcatgttttattttatttcatttttattttctgtgttctttttctgtgttccactgatttttttgagtgggattggtctgcgaaatggtattatttttagcacaaaatgaatccagtgagacaaaatcttgtaacaaattcaactgtttcactgtatgaaagcagggcaggttctttactgatgacaatttctgtttgagaaaccaaactgagttcttcataaatgatgaacaaataatatacacatattattgtatttaggattatagtattgctagccctaaaaaatgatcaatgaagtattggcaatgtgaggtgataattttttgtttctccttttcataatagattttgcctgtcctgttagtgatttgcactgcccgcagctacccaaaacctcaagcatagacaaactgcttaaaattccaacgtttgatgaactgattcaaaacggatagattaacccataccacactccctgtgctgacactaatgaaaaaacaaaacagcaaaagagtttccacttcccagatgtcaatcttctatttgctttaatcattttatatttatttattgatccattcaattatgttggtttattcctacttaagttgttccaaagcatttaagacagatgataagaacacaagataaaaatcaggatcaagaaaaataaaaataaatgttagatgacaaagatgggaggaggaattagaattacaaagatgtgtagaatgctagttcctacataattattaaaatggaggccaatgttcaagctgggcttcctggtggcaaaagcatacatgaaattataataggtacaaaataataccgtaaagaaaacctccccaaataaagaaagctttttcttggcactcgaatctgaaagaaattttttatttagataagaaaatctcagtgatatggataacacaataccacaatacaatctaacaacatgcaacccaacaaaatgtgtgtttttttaaggaattttgttctttgctcaatttcttccatctactaatttttaaataatgcatcctctgtctgttcatttgaggttaacccaaatattttaatatttaataaaatctaagtttaaatctttttacctgcttctgaaaaatacaaggggattataagactaatcaaattgcttcccatgccactttatttgttgttttagttgagtgtgttagttctattttgctttttaattctacaaattaaacactattattattgtcatcaccattgttttatatggccagtgttgaagtgtatttatttataaatgtctttgctcaccatttcttcttgaatttcagactttcaatttggattcattttctgtgagcctcaagtatatccttcgaaattttcttttgtgaggatctatactcagttttgtttgtcttaaatgtcttttattttactcttattcttaaacgatctttttactaatcgtgggatttgggattgatctttttttttctttgacacgttgaaaatgatattctggcttccattaatgctgttggaaacactgctgtacctctaatttttattcctttgtggtgatttgttatctttggctacttttaagatagatcctctctttgaccttgttgttctgaacttccactctaatgtgccaaggaattattttatttgtatttatctgcttgtgatttggcttatcatctttcagcaattctgaaaaactctcagccatttttccttggaatattgtctcttttccattctttctactgtgtttttccagagctccaattaggtgtatggactttttcaaaaactctttctttttctcttattatattttgaaatctcatttctctgtactatattttatatgatttctttagatttatcttatacttcactagttatctctttgtgtccagtctgctgtttaattcatacattgattttaatttaaattatatttccatttacagaagttccagttcaaatatacttttttttttttttttttttttgagacagagttttgctcttgtcacccaggctggagtgcaatggcatgatctcggctcactgcaacctctgcctcctgggttcaattgattctcctgcctcagcctccctagtagctgagattagaggcacctgccaccacacccggctaatttttgtacttttagtagagatggggtttcaccatgttggccaggctgttctcaaactcctgactttaggtgatctgcccacctcggccttccaaagtgctaggattacaggtgtgagccaccgtgcccagcccaaatatacttattttttaaacattttttatttcttgtcattattttcaaatgtctgttttatttcttaaagcatattaagtatatttattgtatagtttacttctgatatttctagtatctgcaagtctgtgaaagtgtgatgttgttgtctgctatttcctctggctcttacttggtgtgccttttgcctagtatactttgtctttgtgtgttgggaggggagttcatgttctttagaatgttatctgcaggattttttgagaactggttaaagttggtgtccttcagaaaggattttcttttacttcgattgcctgggaggactaccagttctctctgtgattgtttttttttttttttcttgtcatgctttccacttccactgcatttctcactggctcaactatagtagcatgaatttggaactacaaaaccacaagaagcaacatcaactatgaagtatcattgataaaaatatttaacttgaatctaatcatgagaaataattgaccaaatcaagactataggacagaatctaggacattctatagagcctggattcttcaaaaaagtcatacacacacacacatgtacgtacaccttaatttataagatagaaatcaaaagaaactacagagatgaacagcccaatgcaaggcatgcccttcattgatttctggatttttttaagtcataaaagatatttgggagtcacttaagaaaattagaatgcaaactgtatattaaatggcattatggaattatcattacttttcttaggtgagataaggatattgtaattatacaagagatgtccttcatctaggagatggctgctgaagtattgaagggtaaagtgtcctgtgcttataactggctttcaaacagacaaacaaaaaaagctggtccaaaatggcagtggcaatggatgtggataccccaagaagtaccaacagcagtgctttgaagtaaaaaagtgaaatgcagtagctagccctctgggcttgggatgttgtggttaataactgtgccatctgcaggaatcacagcatggatctgcattgaatgtcaagctaaccaagagtctgccacttcagaagtgtgtaccgttgcacggggagcctgtaaccgtgcttttcacttcactgtctctctcactggctcaaaacacaacagctgtgcctgttggacaacagacaataggaattcccaaagtatggacaccagaaaaagaattcttccatcaagcttaactgttttgtgattcatttaatgacttgcccttctgtcacttaattataaattagatagaactgtgtcttttctgctttgtctttgccatttgctgttctcgcagccacattgtattctgtgtcaaataaagtccagttggattctagagcgaatgctgtctcctgtgtatgtgaacaaaagtgaacgtaaatgaagggtcccctcttccaaggctgaaaagccaccttttaaaagtgaaatgtgccgggcgcagtggctcacgcctgtaatcccagcactttgggagccgagacaggtggatcacgaggtcaggagatcgagaccatcctggctaagacggtgaaaccccgtctctgctaaaaatacaaaaaaaattagccaggcgtggtggcaggagcctgtaatcccaactactcgggaggctgaggcaggagaatggcatgaacccgggaggcgaaggttgcagtgagccaagatcgcatcactgcactccagcctgggtgacagagcgagactccatctcaaaaaacaaaaaacaaacaaacaaacaaaaaaagaaagtgaaatgtgtgtccattagagccagaacaggattgtcctgtgagtgcatcgcttagtcagaggactccaactgtacaagggggaatgtggatcgctgaccctgaaaacagcagtcagccctgtcttcctctggtgtgatagcagcaggcagctgaatgaggaaagaacgtgggattcagagtcatcacacccagctctgagtcctggttgcataggctggctactgatggcaatctcgggcacgttgcctgtctaccctgagcttttctcctctataatgcaggcttctaaggactacatggcattacatggggcacagaaagaggctttataaaatgcaaaaccactatagaaatgtaaacattgcatgcatatgacatgttgctttctcttcttagcttagaaaaataaattttaaaaaattgtaatatgtaatcttggctggcaaatgtatgaactcaatttaaaaactgatgtcacctaaaattgaattaacacaagagttcaagtttcctttactaccactacctcatcacaacttgttaaaatgttttgggccacagaaggaattgccaattctagtactaatttggtagctatagagaatcttcaaccgagaaacagttttgttgcagtggttctcgaaatatggtctgaggattcctgggggtacctgagaccatttcagggggttcacgaagttctccctccaactgcaagtccatgtgaaactagtttttcttcatatactttaaccaaagcagtgcatcaaatgaagaagcagacttgagaatccaactgtcttccattgtcagacataaaagagatttgcaaaaaggtaaaacaatgctagtcttatcactaaattttttcattttgaaaaatagttgattttaataaaagtatgttaataagtgaaaaaacattatctatacacagacacatacacacatatgtataggcatatgagataaagtagtgactctaagagcactgttcatagtactttgcttcttagagacagggtctctgtcatccaggctggagtgtcgtggtacagtcgtagctcactatagcctcaaactcccagactcaagggatctttgcatctcagcctctacatgcgccactacatccagcttagatttttgtattttttgtagacacggggtctgtgttttgtatattttgtagagacggggtctgtgttgccctgactggtcttgaacgcctggcctcaaagaatactcttccttcggcctcctaaagtacaaggattacaggcaggagcagctgcacttggcctcattgtacttttcattcaacttttttgtaggctcaaaatttccacaaatttttaaattttgtgggaaagtgtaaaaacaaaccagaaaatcacatgaattcccctagaggtgttctcctctactccacagccaaaatcgggagaggcaaatttcttgttctctccttttgggaggagggtttatgtctaagctaccctacactgagggtgcgactcctgatgtctcagttttctatgaaaggtttcctactgggcttttcaccctaggatgtctttttcttaatctcttcaacccattatgctgatacaacagaagtttaaggtcccaggttttatcaggcactttcagggtaaaatctagctttggcactcgctttccctctcaggactcaggctttcattttatatttggtctctatacgtttcttgctttcttgccagctcaataattcatttaattttaaaatttctaccccaagtttttagttattttcactgggaggatcattcagggtatgtcatcacattacactactagaaacaatgcaacagcattttaaatggaagttaaattgcaatcacttttcttccaattcttgcagagattcaaacagtggttacagccacaagcaagagattcaaatagtggttacaaccacaagcaagttttgaaaaaaaaattctttaccataatactgtaaaaaagcttgtggccctaaggcataaatccagcatgttcacctttcaattacacagttgaaaatatagttgtctcaacacaaaaaggtgctctatcaaaccaatctttctccctaatttgtgcagctcatttattcaaattattgtgaattcagaattctacattctgtacaaaaaaaagtatgaagataggccagatcatgagaaaacaccttctcaaaagtcataaatacgttcataacaatgtggaaatagccctgttgacaagtgcagtacatctcttttttcatgctttttaatttgcaaggacatttttatataagaagcaggtttctaaagccaatgtcattcatggtttcctttttagtgtagtgggcttgggatcctcgggattagactactgcctgaggatggtccactcccctttactcaagcctccccttaagatttaggatagacctttcccctggataactgagtaggttatcatcaatttccttagttgcaagaacaccagcctcaattatttattaaagaaaaataaagaaaaaggtaaacagacatgattctgcaaaaaacaaatctcagaattataacatcacatgaaaacccagtccctgattatcatggaataattattcccgagtgtccattacaggttgtagatgctggatatttttatcctgagaccttgtttggcctgaaccagcccttgaactctatttgtctcatctctacattggacaatatacctagctgtacctgcatatacacatgtgagatatatcgtatctctatataaagtaacacacactccacctgagtttggagctcagtatttgctctgttacaaaagcagctgaaatcactcattctacttgtagtcagggcaattaaaatttactctaagtcctgctgtattttccttccatttacaagagggttaggtgccccttccctaacagagtatgctctacttgttcaaagattgtcaacaataacctacagtttccccgtttcctcttatttaagctttgggtgataatagattaacaaactcaattacaaatggaaacatctgaactccactgtcttaatttatttagtgttgctgtaacagaatatccaagactgggtagtttattttaaaagaaagagagagaggtctatttggcttatgattgtggtggctgaaaagttcaagtttgggcatccacacacatgtggtgatggcctgaagctgcttcaactcttggtggaaagcaaaaggggagctggtgtgtgcaaagagatcacatggtgggaggggaagcaagagagaaaccaaggagccaggctctttctcacaacccatcccattctaatccatcccacgagagtaagaactcgctcacctttgtggaagggcattaatctattcctgaggaatccatccccaggattcacacacctctcactagggcccacctccccacaccaccgcaaaggggatcaaatttcaacatgagtttgggtgggacaaaccatctccaaaccatagcacccacaaaaataaagataataataaggaaaccaccatgtgccaggcactgggttaagtgtttatattcatcctccaactaagaacagtactattggcttttccactcacctgaaaacaggtcccattagcatcttcatcttatgaatgaccactctaaggaacagaaccattaaatggcttcccaaggtcatatagtcatggagccagtattaaaggctgttgcactcctaaccaggacactaccccttcttgtttttaccggccactctcagaaatgtttcaagatcatgcatcctgggaatcagtttcaggtccctgaagtcagaagcccaatgctgttcattgagagccatgatatgttacgcaccaccctagagctggttcttaacccataaggtagctatcgttcccatttcccagtgaggaaagtaagacaccactcctttattcatccaagagcgtaaaggacttccccaaggccacacagctagtaagtggctgggccaggtttcaaacccaggtgtggctccaccgtgctgcctctccagatcatacatagcattatgattccttcacgggacagagctatatcatgatgtagcatgctggtgaccacaaccattttggcaatggctttctaaaaatacagagaaaaaaagcaaatactaaaaaactgagtttttggcttcacataatatgtgaagaaggaagtacgttaaattaattacaagaaatgcattctcatggcctcaattcacgtagtgtgccccagaagcaaagttttatgcattgattagacattcactctccctaaggcagtgcaggcaagtagaaggacactgtgtctagggtcagaagacctcagttcgagtccactttctggcatttccttgggaaggttgttcaatctccctgaccttcagttttctaatctgtgcagtggaaattataactatagtacctgctgaaaaaattggtgcgttataattataactatggcactcatctgtcccacctcattgttgtaaagattagatgagatcaaatataagacaaagctccctatctgaatgagatatttaaagttggttattattatgatgtgggtttctaggcagtaaaaacttaccatactcttccacagaaaaagaaaaagatgacgtgtggatatatgtttacttataataaacatgcatatatatgcatgcatgaatatgagtacaaggacatatgtattagaacattgtggtgtgcaaaagaagatgagaaaaactagtcataatctcgcagaagaagccctgataaagtatgctagggcaagtctgcaggcctctgattttagctgcttaactattggatacacagacagtgttgaaagattgtgttcaaggcactgcagccctcagagaactagccccaaagcccatgaccccacaagcaactttagggagctgctgtggatgaagtacctggccccactggaaaggcactagaaaatgagctcttactttgcagggagtggtcaggggaacatcaaggaaagaagaaggaatcatcaatggggcttggggctcactcaggaggagctcttcctgataggtgctttaaaggaatcagtgctcaaaacccctggatgtgatgagctcattcatccttgagggaccctttgtcgcctctcacctgtccttctgaggtcctccacgcgttccccttctctgttcttattccaaattcctctactacatttactcaccctggatttctgggtaaactttattagatttgttacatctattttcctttcccattagtcaatttttaaatgtggtagccaaaataatcaacatcactagtaattatacccatactcaaaaactcttctggtgaagaggcatggcagaactccacagggaaatcctattgtgaggattatataggtcggaaagtcatttttaactgacatgcatgataaagcacatgctacataccaatggaatttaacgttcaaatggaataataaactatgtttgcagtatacatttctagatccatacatgaaatcacatttccattaaacagttttcaagtcagtgaccaattccctcctacttctcctgaaatttatatgaacctggatcattttaataccactggaaagaaacactatacttagaaggagatgaacaacagatttaatattttttcgtttgcggtactaggaggcaagctggtaactctaatgccctgtgtgcctcgactcctagatctgagtagtcaataagaaagtagggaagggactaccagcaagaaaagaagcccactaatatttccttctccttccttctgtgttttcttctgcttaataattgagtctaatattaatggacaaggattgccagaaaaggcatgatctagaacaggggtcagtaaccttttctgtaaaggaccagagagtaaatatctgagcccttcgcaggccacatgggctctgttacaactactcaactgtgccattgtgccacaaaaatggacacagcattgctgtattccaataaaactttaattatgagccttgaaatttgaatttcacatgattttcacatcacaaatattaaattccaatcatttaaaactataaaaattattcttagctcactgatcctataaaaacaagcagtgggccagattcagcctataggctatagttgccagtccctggtctaaaacttttaatacattaagagtattcttctcattaaaaccactgaaattgaagtcattttctctctttctgcccatttacttttccctaagactttaatttttttccccacactctcattcccattctgatttaccaggacattacttctcctctctacctcacatatttgttttattgcactataaacctcactggagaataaaactatttgccaaagacccacctgtaaacacccagcactgcagcagccactaacaaagaggaagacacagaacctgtggccaatcatgtggacattggcaataatccattcccttctccttctttcttcctggtagagtccacctcttataatagtctgaagaaaacagattgttacttttccaccttcctggcaaacaaaggggtatgtctgtgaccaactcctggacagtaagacctgaagagaagtctgttggggtgcttctaggaaaggtttttctcactggaaaaaagaaagctacaagagcagaatccccaccctctccttgtttcctacttttagatgatatcatgtaaagagacagtgtttagagctgcagcagccattttgcaaccatgagggaaatccaggaattggtccacaggcataacatcattaattcaccaaagcacctccacagctctctccccctggacttcctgttgtaggcaataataaatccccaagatgggaattttgttgccatttattacaccgacagacttcattcttgcaaagcttacattgctagaggagtgatgtgacacataaaatgaaaaacccgttacaaaaaaacataaaatatcaggcaggacacagcggctcacacctgtaatcccagcagtttgggaggcggaggcaggtggactgctcgagcccaggagttcaagaccagcctaggcaatatggcaaaatcccatttcgacaaaaaaaaatacaaaaattggccaggcatgtagtggacacatgtaatcccagctacttgggaggctgagatggatcacttgaggccaggaggttgaggctgcagtgagccgaggtcgtgccactgcactccagcctgggtgacagagtgagaccctgtctccaaaaaaaaaaaaaaaaaaaaaaggaagaaaaaacctaaaataccataactcctccctccttggcagctctattcgacctaaatcaaaatacgttcatatctctcccacagagttactgctctatatatactttctgctttacagacaaacttcttaaaagttaatctgtccttagcagggcacagtagtgcacacctgcaatcccagctacacaggagactgaggcaggagtatcttttgaacccaggagtttcagaccagcctgggcaacacagcaagacatccccaccccaccccacctccgccactgtctctaaaaacccaccaacttatctacccttaccatctccacttcctattctgtcatcctcactcctcaaatagcaatactctgcccttctttcacccacattactccatcaaactgctttcaacagagtcaccagtgacttcccagttgataaacccaagcacagtttttagctcttatctggcctgacctctccacacaggtcaaaatagtcgatactatacactatacctcccccgcaccatactttttttttttggtttgtttgttttgagacagagtcttgatatgtcgcccaggatggaatgcagtggtgtgatctcggctcactgcaacctccacctcccgagttcaagcgattctcctgcctcagcctcccaagtagctgggattacagacgcccaccaccatgcccagctaatttttgtatttttaatagagatggggtttcaccatgttggccaggctggtctcaaactcctgacctcaagtgatccacccatctcggcctcccaaagtgctgggattacaggcgtgagctaccatgcccggcccacaaaaccatactttccagattttcttttgcatccttaagtatttatttctggcttctccttctactaggctcttaatactagtgttccccagtgttcctgtacccccctccctgttttttcttattttacccactctttttatatagtctcatctgtacctacagctttagtgaactaattagaagtaatttgtaattagcagcactgattttcctgttgaaagttaactactaaaatccctcgatgtgacagttcttttagttaggacaaacatgcccccaggaaatgaagtaatactattcatttgcttgcaaaccattttttccccatagatgaacttcagcccaaataaaatcaaactatccaaaattcccagctacttgggaggctgaggcaggatccaaattcatgtaattttcgtgtattttgcaagtttgttttatgccatattaattcattacactccacatcatattttcttagcaaatacatctagacacctggcactcagtaagggatattcctggcacgataatcattgttatcattagacattgcaggaaccaccatatggatggataaatgtgttgtttaatgaaggcaagcaattactttaagagatcctagttgttataaactctctctggacttcaagtttggtatatacataattattaaatgtatacataattattaattgtaacatgtcctcacaattgatttctggctatttttctaaggattttacactttatttagtaaaatatattaaagaggttaatgataatttttttatagagacccttagattgaaaatgactgatttttcacacctcttttcttgctttactaatcgtcagtgcctaattgctaaagcaaaatatcttctaaattctggggaggaaattctactttgggccaggcgcggtggctcacgcctgtaatcccagcactttgggaggccgaggcgggctgatcgtgaggtcaggagattgagaccatcctggctaacatggtgaaaccccgtctctactaaaaatacaaaaaaaaaaaaaaaattagccgggcatggtggtgggcacctttagtcccagctactcgggaggctgagataggagaatggcgtgaacccgggaggcggaggttgcagtaagccgagatcgcgctgctgcactccagcctgggcgacagcgagactccatctcaaaaaaaaataataggaaattctactttgaattgcacactaatcaaaagactccagcttcatttacagagaccttatctgtgctaagtagtttttggaatagcttttttcctgtcacttaagcaccttcctttattattaatagtaaactaaataggagtccaaagtctgcctttcccagtgctagagtataaatgtcatcacacggtagaatgtaaacatcttttttttttattatttttatttttttggacagggtcttgctccgtggcccaggctggaatgcagtggcatgatcatggctttcactgcagtctcaacctcctgggcccaagcaattctgtcaccccagcctcccaagttcctggggccacaggtgggcaccaccatggctaactaattttttaatttttttttttgagacagagtctcacactgttgcctgggctggagtgcagtggtgcaatctcggctcactgcaacctccacctcccgggttcaagcgattctcctgcctcagcctcctgagtagctaggattacaggtgcccaccaccatgcctggctaattgtttgtatttttagtagagacggggtttcaccatgttggccaggctggtctcgaactcctgaccttgtgatccaccggcctcggcctcccaaagtgctgagattataggtgtgagctactgcgcctggcctgattttttaatttttatttttatagagatgaggtctcactatgttgcccaggttggtctccagctcctggctcaagtgattctcccaccttggcatcctaagtgctgagattataggcatgagcctccatgcctggcccctttatccatcttttaatgttaataattatatccatttctgtttccttcaaaaattcaagtggaaaacctgacataaataatggtaacttttttattatacctatatcaattaacacatatgtataaaacttctacttagttgtgccaaatatcagtgcacagtatgggtgatttcccccacttgcgaagaatggtgctatagtcaccgcacaggagcaggatagatccccactctcaaaattgggtttggatatcaaaatcaataatgccatcacacatgcagcaaaggggtttgaaaggtttattgctcacataatacgtttttttgggggagagtaagatgggcttccaagctggtctgaaaactagagagaacaagaaaggagaatggctttgggattcttattgtggttaggagtggggctgtggtgagggttcctgtacatgggctagggcttactgttggaactttgtgctagtgccaaggaaggagcacctaggcattcttatcagtttgctcagatgtggggcagagaggaagggaagtggtggggcttgagaactgtctgcagtcaaacatcaaaaattaagtcatactctgtattacaacaattagaaaagaaataaaatgtagtatatcagttctctattgctacaatattgttacataacaaacaacccccaaacctcaatggtatacaaaaataaatgtgtcctgctcacacatctggagtcaactaaacagctctgctgatcttgcctgaactcattcatctgtcagcttgatcttggctggctttgccaggggtgggctataccctgctctatgtctctcatcctccagtaggccagcacaggcatgctatcatggcaaaggcaaaggtgcaggagtaaaccagcccaataacacaagcactttttaagcctctgcttgtggcacttttgccaaaatcctgttggccaagcatgttacgtggccaagccatgagatgtgtacacagaaaaataaaagatgtgtacacagaagagcaaagaattggggccatttttgtaacctactgcacctattaatggattactaatatgtcacaactcttatcctagattacagtattaagagaaggaaagtcaattcaatgatatatttactactaaatgttaggtactgtacttggaattagagttacaaaactaaatgagataatcctaaggagctcacagttggatactggaaaaaaaatcaaacaaattaatacattattaaaataaatgaaataaaatccaatgtaagtacatgaatagatattttaataagaagtggcatggaaatgaaaataaactcttttgtctcctttatcatatatttcatagctaattaaattaattttattataatcaaatttactgtagacctgaggacataaagtttactgagactccctagcgaatggctgcataaaaatgcaagccctctaaaagcaaaaccagattgtaaattctgttaggctaacagaaagtcatttgattcttttgtttttccgttacacttagtagtcaaccaaaatttattgtgtgcctatatgtgtgtattagtcagagttctctagagggacagaactaacaggatagataggaaggggagtttattaaggagtattgacgcacgatcacaagatgaagtcccacaataggccgtctgcaagctgaggagcaaggaagccagactgagtcccaacacctcaagtagggaagctgacagtgcaacctttagtctgtggctgaaggcccaacagcccctggcaaatcactaatgtaggtccaagagtccaaaagctgaagaacttggagtctaatgtttgcgggcaggaagcatccagcacagaaaaagatcaaggccagaagacgcagcaagtctgctcttccgtcttctcctgcctgctttattctagccatgctggcagctgattagatggtgcctacccagattgagggtgggtccgcctttcccagtccactgactcaggtgttaatctcctttggcagcaccctcacagacacacacaggagccatactttacatccttcaatccagtcaagttgacactcaacattaaccatcatgatgtgcaagctattttgctgggaatttgctaggatcgaaaattcctagtttttttgttgtttgtttgttttggttttgaatctttaatgagaaaaaatactattgtgctcaagaacaccgtgcgtctggtgtgtcattgggtcaagggttggggacacacatggcagaattcagaaacagggtaacatcaacaaaaatacacacggtcataaaaagaaaaactggcacctggcatgatcaactctgtttcctcatcattcagcagcatgttggggatcctgcggctgatggggaacacacgtccagactctgggcactgcagggtgccctccaacacatctacctccagcagcacgtggtgcattgtcctcaccatggagattcctagcaaatactctaggtattttaaatagaagaaatttaatacagggaaatgattacatatatagtagaagaactgagatgtcaaacagaagagtgaggcaatccacattttagcaactgcagtaagtgacctccaatgtcatggctggagggtgcaaatggtgagaaggcagaagctagaatcatggtggaccccacctgcaagagtcacaaagaagatgcatccattcaggtcacagagaagtaaatactctagtgtctaccttctaccttcttattgctctctagtctcccattttatctagactgctgacaagcatgcagtggaaggtgagcaccagatctgagaggaaacaggcagtgtctggtggcacactacacaagaactctcacaggcatccactaggcttgcttggtgactcatttaaggagtaaccctattttatgtatcagagtagtctatggtgtgatatagcatattgctgcttttgatgtttggtttcatttgttccctgtaggcacctaatcactgttttttaaattccccaggagattctggtatacccaatcagctgagaaccactgaatagtggctttcaaaattttgagcatccaaatattgtcttcacagaaaatcttaatctctgaagtctactgtaaaaacatagaaaggcaaggctgttctgcttgaagcgtagcttgggagcctagattcctctcaaacccaggccactcctgggaacatggtctggagatttgaatgttcccaaatctagtttatctcattagtcgatatttatgcacatcctctgtgtctctcagtgttctctcatgtgtagacatatgccccattccaaagagtgactgtagtgtaatgtggcattaaaggaaccctggatagacctgtattggaccttacatattagagagctctgcagatagctcacaaatctccaagtcgctagctgtaaattgagtgataattggtgtcaggttattttagcacagtttggggataaaatggtgcattaatctcccagtttgtggcttattaaactttgaaatggaattatttgagacataaaagagatagcaatactttgctggatgttctccattagtcgagattgttacagaggagaaatttttgccactgtttatcaaatattttttcctctagttaatccatatcattccgggagctttgcccaggaaaaggacgaattacttgcgttcctccgatctctttcaagttctactcccgtacctttaaactgtcacacggaatctttggtgacagaggaatagaggtgggcaagcagggcgtttggaaaccatactgaaaacgaattatccataaagcacagattcaccagcctagaaatggctctgtctggatggattccttgagatgtgttttatctccattaaaaacacaacaactttcaaactttcactgtgtctcaaaatgatagagaaaaaaattcagcctttcaagtattcaagaaaagcttgaagaaataaaagaaactcgctgctctctgggccactttaggaggcagagcgttcctggagaacttcaggattcattcgcaagggaacccaaggtgggcattcaaagccgatccaaaggatattcttctttttagaaaacaaaaggagcgcaaggagtaggggactgaaggtgcccaaagctagtgggtcagtgtcactttcttcctccctttcgcccctttcctcccgctcctttctcccctgtggtctctgctcagcacccctttctctccagccccgactgcccatcttcgcccctaccctcgcgcgtcggggccgtgtctacacccaccccaggacctggtccgtccaggctccttcccatcctcacacccgcgcctttctccctgcggccccggctcgctgctccagctgcccagctcttcccaggacaggggatcccgccaagggggccgcccccgccccggccctcccccgcccggccgcaccataaagcgcccggccgctgccgcggagcccagcagccagctccccagcaccgcgcggcggggacgcgagcgcgcccccgacggcagcccggacgccgagcacgggtcacctgcggcgccggcccgggcgccgaccgaggttcaacgcacggcccggggacccccaggcggggccaacgccgccgtcgcccccggcctcgcggggagcaggaagagccaacatgctggccccgcgcggagccgccgtcctcctgctgcacctggtcctgcagcggtggctagcggcaggcgcccaggccaccccccagggtaagtgggttcgggtcgggcctgggagcgccgggcaccgggtgccccatctgctgagtgagtggagggacttgctcggccctgtgctcctgtggccttgctcagcccctctctgtccctcccgggcccaatcaaagcatattgtgattggaggtagtgattagtctagaattttccgaaattcgattatccaatgatgagaacaattgcctaaatagttgggggatgcaaaattgtttcagactatgcaaagatgtggggtggggttgccttcaaaacttgctacacggtcctagacctcttaacatgttaggctctggtgtagggtgaattccgggtcctgcaccctgtgccggttccctccaggcagccttgctccctaaatccttcctcaggcggagcgatgtatgcccagagtctgctcttgacatccctgagaaagacgcagaattactctacttgccctgccacctgcattttctgctctgactttgcttgaacgacaaaaagaaagtttatttcaaggattggcttgatgtcttaatttctgaggtaaataggaagggctgagaaactggtctttttcaatgaaatcagttctttgcagcaagatggatgcagctggaggccattttcctaagtggattaaggcaggaacagaaaagcaaataccatgttctcacaagcgggagctaagcagtggatagatatggacataaagatggaaacagtagacactggggactccaaaagtaggggggaaggttgggaaaactaccaattgggtactacgttcactgggtgatgtgttcactagaagctcaaatcccaccttatgcaatgcacccatgtaacaaacttgcacatgtaccctctgaatctataatttaaaaagaaaaaagaaagaaattgatctttttctatgaaacggtaaaaattcaacaaataatgtgaaaagatacttggacaatcctcaaaccccttggtgaaatggggtgaaatagccattgggtagaaagcagttaaacagaattttttgtaaagaccaaaaggaagacatgatttaagcaaagaaagatcttagggctataactggccctaactggtcaggcgtgagcttcatctgtttgaacttggtgcctgggttgatttattactgactgtggaagtaaaactggaagagacgcacaacttgaagtaaaagttgtttttcctcttgtagccagagcaaagactgcctatgagggcgttctcaacttccctgcctctcgctgctggaatcacccatttaaactgcatttcgccaaataactcattttcattccagaccagacaaccagaactgtggtttcaggggttagagtactgctaacttttagtttgtgttgaagtatttgaaatgctgtagtccgtgccccatacttctaggaaggtaaaaaaggaagcttttaaacacttcaaaagtcttattgtgatgatatttggcaagttcaaatttataggtataatttttttgtgttatatacgttcttgacttttgaacatacagctttatggtgtgccttaggtatgtctcagacatacctgaccattttatggagatttgaactcggcctatacaacctaaattatctgggtaatttagttgctgtagatgatctgattaagttaagtttctgatagattcttttattgcattatctagtctgcaattatcaggcttaacaggataatttgattatctccttcttcccctgagcttcattgttggtcttaaattagtatatattcaatttacataccatggtagctgcgctcattggtagcagtaatttcacctctaacagtagagggttgtgctttgatcctggcacttaaacgtaataacattaatagaaaatggtagtgtctcatttccttttcaaaacactctctatgttcattactaactaatcccatctctgccgcttgagagagatgcaaatgaatcagacgaaccatagattgaaataccgcaagtttagcttgagttacatcatgaacctgatcatagtcaaaggaagaatcaagagtactaagaattttgttttgaatgtagttcccatactttaaatacatatctcttttctgaagatgttttgtcctgaatggaactttaaaacatattgccttatttccctttgccctcattagtggaaatgtaaagtttccaattctcttgaaaattaaaaaatccaatttcccttttgaaatgcagtaggcaacagtgtttatggtttagggatataggcactaagaggagcacagtaaatgttctgctttccaacacatctcatgttaatttcattattgtgtaaggacccctggtacatgtgaaaaatacagtatagatccagtttgaagacaaattgtcttttaaaaggggtaaatattcttgagtaactaggtttttgcctgtttgctttagaacttttattcattcttattacaaaagcaatacctgcccattgtagaaaagattaaagttagataagcaaaaaataaaataaaaagaaaagaggaaatttaaaacttatatttatgcaacccggggatagcttctattaacattaacatgttgttgtattgtctttcatttcaaatatttttctatgcaaaaatatatttcaaatggaattacgttatacatatagttttagaatccttttttcttaatgtatcatgaacatcttttcacatctgtaagtattcagctacattttaaaaataggtagtattctgctttttggaagaatcaaaatgtatttagccagggttgtaatatagaacccttaagttgttttcggttttgatattgtaaatattaatttattgaacaagtgcaggtgtcacaggatggtttgggatgagtttaaccatcccctcaatctcagccaagcccttctctttttttttgctaaggacagttaatgttttcatagcaaaatgctatgccaacagagctcaggtttacctctcttccaattagattttcacctaattctttcctaaatagaaattctagaattaccactagtgtctaatattcttgtacctaaatcatttaccatgttatccattatttccctaggataaattcccataagcagaattgctagatcaaggagcacatatgttttagggcctttgatactgttgtttaaactgtcttcaaaatgtttatactagtttaaatgttacacagtggtacagagagtgcccatttccctgaaccctcacaaacagttgagtactgttgtatttactaattttccaattcgatggtgaaaacaatacgttattgtttaagttagcaactcctgcatcattaggtaaatacatgaacatttatttatatacttaatggtcattgtaattctttttatgtaaattgccttttcatattccttgcccatttttctattaagatgcttatcattttattgatttgtaagaactctttatcaattgtcaatattacccatttaataaccagattattatatccaagagacagctgtaggtgctgaagtttctgcagcctatggaattgttcaaatgatatttgcgtctgctaatagatatactaaataacttccactgagtattacccaaatttggcctttgccttttaaatgactctgggcatactctctcatagctttcataaatattacaaagtttgtgagagaaagtactgcttgcttgatcaaaagcaacttatacaaatacaaatgcagattctgatttttgtagagcaattctatcagtcaagagacagaaaccacatcattttgttttgttttgtttccacattgggatttttttaaacagagaaatgttggagaattgtaaaggcacaaagggaacacttaggtctcacaaaggtggcaaatcactttctaccagcacatctaccaccatagccatgttttctgctgcatttcctgtcatttgtcactgaccaggaaaacacaattggctctggtcctggaggtgcctatgggactccgtgacagaaattcactgcttggggacatcagtaaagcaatggcttggatgctttcaccagtcccccttgtactttaagcctttagtgcttttcctggtgggcattttcagagctacttgttcagccaaacccaattatgtgtttgcaaattcagtcctctctcttgagggctacacccagtgatgaatattgtgctgtatttcttctggctcaaatgtccagccactataaaagtgacagggaagaactggtgagtttggcaatacggaaaagggattacaagattagtttacattactttgtagcttactgtcaaattgcaccccccccaaacaaagaaaccctgttttccccaaaattgaatctttcacttataccccttcttctcccttcttcccagtctttgaccttctcccatcttccagtcagaggctaaacccaggcgctctgctgccagtcctgacagaccccgccctgaatgatctctatgtgatttccaccttcaagctgcagactaaaagttcagccaccatcttcggtctttactcttcaactgacaacagtaaatattttgaatttactgtgatgggacgcttaaacaaaggtaagcaaatttgctgaaattattttcttaaaaatctcctttttctattccaggattaggggtatactgtctttgagatggtttccttgtacaattatattctcactcactagtcatttcagtttttaatactgaattcttcttactgtacatttacctatattggcgggggggtggggggcggttcaggaagaaagtgacattgggagaaaaaaagaattgctgtgaccaagatgctttttgacattgtctcatcctgatgttattctgaatccagttctggaacagagaggacaagggacaattcagccattatcttaggcagctcaggctgctataacaaaataccatagactttgtggcttaaacaatagacatttacatctcacagttctagacagtggtaagtctaagatcatggtgccatctcagtccattttgtgttgctataaaagactaccggagactgggtaatttataaagaaaagagatttatttagctcacagtcctgcaggctggaagttcaagggcatggccctggcttctgacaaggactttcttgtgtcacaacgtggtggagaaggtcaaagagggagcagacacatgggaagaggggaaaacctgaggggcaccgtagctttataataacccactctctcaagaactaattcattcccttgagaactaatccattttcacaagagctgaaactcactgtctcgagaacagcaccaagccattcatgagagatccaatcccataattcatatgcctcccacaaggccctacctcccaacaccgccacattggggaccaaatttcagcacgagttttgacagggacagacataccatatccaaaccataccacccgcagatttggctccttgtaagggcccagttcctggattgtagatggccatctttttattgtgtcctcacatgatgaagacagacagcaagctctcttgtgtctcttcttataaagtcactattcccatcatgagggccacaccctcaggacctcatctaaacctaatcatctcccaaaagccccacctccaaataccatcacactggagattaggagttcagtatatgaatttgatggggcgggaggaaggggacagatacaaacattcagcccatgacagccaccccatactattcttatgttccctttgaagccagtgctcagtagacctagctcctaactccttaagcacctacctggccgtgatggaaagaatatacctcaaccagtagaacaggatgaatagggctcttttctccctgtgcgtgccaatttacacaggcctgtcactggtttgatccctctgctgtcatttgttttgttgccgtagtgagttactataagcactgagaagtgagtcccaaagaaaatggtcactatttttcattgccttctcctccactccttccccgggggacaacacctgttcctgtttattaaggaatgtgacagatgcgtgttcctgctgcttcatgcatttaataaaataggagggctggttcttctggctgggttttatgtttatttcagtttgctttacaaagtggacacttcctagtgcttcaaactctctcttagattatatttgtgattgtacacttaaatctgcaggcattaggaaatgaaagaagtttctaattcttaactttcataggactctaaagttaaaagtataaatgaatgggactttaaccccttcttttctgtcagattccaacatgcttcttgcctgcttccacgctactcccaagtctgctttctctgtatgtgcctcatagcctgtcaggggccttgaggaggtgtcagataataaagtgagtctgaggacatggccagcagatgggtcaaccgttcctgtccccctttccccatcttcagccctaatgaggggggattctgcccatgtctctgccttgaatcaaacagccccattttgcctagcatctgctgaaggaactgctcatcttctgacaacccagctactcagtttgtgatcgtaaaaatcaccgttcttcatctgtggatcagcagcttctcctaacctgtctatttcagaggcattgcaaagatttttctttcggttcatccagcttaatggccagaagttcctctgcagagtaaaaaactgctccaagcttttgccctcactgcctctcaccctctatttctaaattggccagtatgtgtgagcccattgtggaaagtctgttgctgggaaacacaaggaagcaacttcccctgaacggatcctttcagtttgtatagacaagagtaacactggatttaatgggcagtaggtagagggtaaggggatcgttagtatgtttcctctgaagaatcaccagtaatatgagtcagctgtaaataccagttgatcaaatattttaggggctgtaatcccagcactttgggaggctgaggcaggcagatcacctgaggtcaggagttcgagaacagcatggccaacatggagaaaccccatctctactaaaaatacaaaaattagccaggcatggcagtatgtgcctatagtcacagctactcgggaggctgaggcaggagaatcacttgaacccaggaggcagaggttgcagtgagctgagattgtgccgctgcactccacacttcagcctgggtgacagagcgagactctgtctcaaaagaaaaaaaaaattagaggaaaagatgaaagggttgagatgaagaactgaaagatgaacatctccctaccctccaacctattaggaaagataaattgttcttagaaactgtgggggcagaaggagtcctggaagaatctagaaatgagaattctcataaggcaaagagggatttatgctgttattagagcttgaagagttgaagaatgacacagagaagttgtttcactggagcagtcggaaaaaatacgaagatttgccagcactggtgaatataaaagtttcaggaaagagaagtccattctgactggaacaataaaaagaagtcactgggtccatcagatccaaggaaaagacagagcctgtggttgagactccccactgcagtgttcagtggtggccatgctgacttgacataattctccccacaaccctccacaaattatctacctggacatggtaggctccagacagcattcatctggccaaggttcagctgatctcctcttttgctgatttgcgtggaaaacggtgaaacagaagaaatccaagtggatctctactgacttaaaacacctgagtaggaaataaaacacacccttccctccattaaagtccaggactgggagatgaaggagggtgactacacagcatcaaagagcagaatttggtcatctgggcctcatatgacctcctgaaacaaattaaaatgtagctaatgaagactgcaaagaaagagtttgccactgagctctctgcttctactctcaccctctccaagtcagcctaccccaggccacctcattactgttcacaaacataatttggatcaagatacatctgacctctgagacctctagtggccccctttccaaattgaataatgtacccatgtctcagcaaggcattcggggcttccactctgcatggccccaagcagcctttccagtttatccctcattccagcctccatgcagcctgagcttcaccaagataggctattgccattccttggggccgcacatgctgcctctcctccatccttttgttcctgctgtctgctccctcgacacatatcctgcatcacctcttgacacccaaatcctacacattcaagacccatctccagctccttctgatattctttctaatatgactttgtacctcttaaggaagacattcatcttagctcaccttgtacttgaattacttctaggtcttctctccatttggttgggagctctcttgagacagggactatacagcccttatctttgcatctgctgcagcacctagcaaggtgccttgtacatagaagtagttcatggatagattgaaaagaataaatggaggctgagaagagtagacttgtttgtgaaaaatgacatacaccattgtgaaattctgggattccacaatatctgacacatagtaggtaataaaaaaaaaattatttatttatttatgagacagagtcttactctgtcacccaggctggagtgcagtcgctagatatcggctcactgcagcctctgcctcctaggttcgactgactctcctgcctcagcctcccgagtagctggaactacatgtgcgcaccactacgcccagctaatttttctatttttttagtagagatggggttttgccatattggccaggctggtctcgaactcctggcctcaagtgatcctcctgtctcggcctcctaaattgctgggcttacaggtctgagccaccacactcagccaaaaaaagatttttttttttaatgaataaatattgaagggcttttggaataggatgtaagaggatacaggtagtatttctggtagaagtgatctgccaggttatgagtaatacagcctttaaatcttgatagaaataagcatcctgcagaaaccacctggctggatagaagatatggctgatgctcttctagtatctggcgtaaagacaactttccagtttgtatcctgagtttgagtcacaaactgcatcaccatgaatacatctctgaatctctcttagcccttgttgattgcctataaaatggggataataatagctacctcacaggctggttgcaagaactgaattatataaggtataataactttcttcagactatgaggcttaataaaattttcatactcttaaacagtattagagacagatttccactatttaggcaactgttttctaatgatgatggtttggtgaactcttggcttgccttgatgacaatttcacctttcagaaaaagaaacacaagaactgcttctttagtcttagtatgattgtctcagaacaacttggtgctgtgaagtgaaggaaacccaaagtgtttgctgtaatgaccagagagtgtcagtgaaactccttagcctaaggataggacatgtcaaatagttcagagtagtggttctgtagcttgcaagctaaagagaaatatagattaagagagatggtagagcttaaaaaataaaattatagacacaataataagtggaaaaaatgaggggcctcaaacattaataataatatttatggagtcttttttttttttttttgagacggagttttgctcttgttgcccaggttggagtgcaatggcgcgatcttggctcactgcaacctccgcctcccgggttcaagtgattctcctgcctcagcctcccaattagctgggattataggcatgcgccaccagacccagctaatttttgtatttttagtagagacagggtttctccatgttggtcaggctgatctcaaactcgcgacctcagatgatctgcctgcttcggcctcccaaagtgctgggattacagccgtgagcaaccatgcccggccctatggagtctttttaatgtaccaggactgtgttaaaagctcaaagcctatttccccttttaactttcacaatattcctatgacatgcccttgaattagcttaattttaaagtggtcatgtgcagaagatggaaagaattttaaaatttgacacaaaactataataattaggacaaaaaagctaaaacctaattgagtcaaagttggtgattcacacataagataataaaatggatgtttttagccatgttcagaataagatatggaagatatggaagaaataagcctacctcctggaataggtaatgggagattaacaggtgatagaggtaagtcatagatggctcttttgtttctgtcttacccatcaaggggagtgttcttcaaattgtcaagaacagttaaaagaaaacaaaaatccaagctagatgaggagatagcagaaaaacgcccactctctttagtgagattaactattcaggagcagatgaattacacattgggatatttagtgaagaaagtcatagtggagccactgttagttcatttagaaatcatggagaacagaaaggtcctaaaagacaggacaggcaaatgtttccatttttataaagaagggaagggtggattctgaaaaccacaggctactgaaatttaggacagagctccagagggttatatgattattcatgtattttgggattgcccagaaaagaaatctgggattttttctaagacaaagtggatttactaagaataaatcatgccaaacttttttttttcagtaaagtttcaaagctgatagattaaaaaaacatgctgtgagcataatgtatctgacttcagaaaagaattggatgaagtcgcttattatacctttctaaataatataaaaaagaacgagctaggtaatagtaccgctaggggttgctaagtcactgtatagcaaattatctagtggtttttgacagggctctgtcttgggtattgaactgtccaacatgtcagtgacttgagcaaagacagcattttatcgtgtttgcaattcaaagctagaaaacagttgaacatgttggatactatcattcatatttacaaagtcctaccagataatacaatgggccaaaatcaatcagatgaaatttaacaagaataaatgtaaagctatcaactaggagtgaaaagcaaattgcagaagttcaggatgtgagacatctgtcctaagagttctctaatcaacaacaaatcctaatcagtgttgaggatagtgcctgacacataatggatactcaaaaatatttgccgaatgaatgaatgaacagatactgtgatgcaactgtttataaaaagctccttacattttaggtttcattagtgcatacatatggccaggttaaagaagctaagagtcccactgtactcttaattgtccaggccacatctaatactgtgtctagtcctggacacatttcacaaggacactgtcaagtcaaagattaccttgaaaagagtcaccaaaagagcacctatctggaccccgtttttttgttttgtttggttttgttttttgttttttgttttctgttttttgtttttaccacatttaagtagaaaagttaaaggaactagagaaatgaagaagccagacagaagacatgaaaaatatgaaaattgccttacaatatttgaaaaaagggctaggtgccgtggctcatgcctgtaatcccagcactttgggagtctgaggcaggagtatcacttgagcccacacattcaagaccagtctgggtaaaaaattaagaattttttttttttttttttgagacagagtctcaccctgttgcccaggctggagtgcaatggcgcgtcctcagctcactgcaacttccacctcccaggttcaagcgattctcctgcctcagcctcctgagtagctggggttacaggcaggcgccaccacacccgcctaattttttttgttgttgtcgttatccttagtagagatggggtttcaccatgttggccaggctggtctcaaactcctgaccacgtgatccacccacctcggcctcccaaagtgctgggattacaggcatgagccaccgcacccagccaaaaatacattttttaaaaaattagcctggctcgctggtacatgcctgtagttccagctactcaggaggctgtggcaggaggatcacttgagcccaggagtctgaggcagcagtgagccgtgatcatgccactgcactccagcctgggcaacagggcaagctcttgtttcaaaaaaataaaaataattaaaaataatttttaaataatatttgaaaaatgtcatttggaatgaagatcagactaaatctctgtctagctctgaagagtaaaattaggatccattggtagaagacagaggaaacagatattggctctgtattaggaaaatcttggagagtgatccaaaagtgaaatggacttctctgcaaagtaatgagttccttgttactggaaatgtgctggtagaggctgcacttttattgaaggaatttgtgaagtgagatattaagctggatgacttataatgctaatattttgtcattgtaccaaggctagagaagtttcataggcacttaagaaattgctttgcacctctttcctgtaacatgaccttgggcttctgtgcacactcactgctttgttgtctactagatagttgcatactatgatgaatctcatactttttcaaaacacaaagtcctctgcagatgtttagcataattgctgtgtttcctttcactagatagatgtgtgtgtgtgtgtgtgtgtgtgtgtgtgtgttactctgtatactttacatttattcaaattgccataagaaaactttgaaacagactgcatttatcacagctaggagtcacccagagtactttcagaaaaagcaatttgctgatttaccttttgtatgtatttccaaagcactaaagttacaaagacctagtgtatagggcatgaagatgaataagcaaaggcaaacaagaatatccatcacaagagacattaatgtcaaggaggcaatttttaaatgtacaattatttaaaaagaagaggaaagattgacaatgatggcttccatcatatgtttaaaagtgccaaagagcaaagccatttgccaaacaaagcaaagagctccagactacctttgtgagtttgctgcctgcaggccaggccactctggactcctttgcccaagcagacaaaatattatcatttccagttctttaaagctggcaccctgcttcataactttgacattcaacatatcataatatttttgactaccaggtccacttttcaaaaagcatcttttgaaaattctttctgaagatagcaatatttcaaatcttcattgcctgggcttgctttttcatctcctgccagtcactgaaatcgtatttaatcagactgggctatgtggttcctgtgtccggctggtcccaagcatggaaatgtagctcttggacagtgccataaaatcaggcaatcctgagtagctggggttacaggcaggcgccaccacgcccacctaattttttttgttattgttgttatccttagtagagatggggtttcaccatgttggccaggctggtctcaaactcctgaccaaattgtcaattacacaaagatgccaagtttagagggaaaggatttatataaccaacaaagtgttccacattttaaaaaagacataattgtgagtaataaaagtcagagtggacacactctattttatctattttttttcacttcccataagtagttgtagtggtgccctcagatactatgggatgtgggaaaatcagtaagatatagacttggcagcatgaagggacttaaggtggtgggaagattagggccagtcctgggataaggagttgaaacattatttagaatccactagggagttattgaaggatttcatttgcttgcttgctttgaggaggcaataacgatcagaacagtcctataagaagttcaatctctcagtccaaaaagtccgtgcagaaagagacctaaagtaggaaggggagtcaggaatctaacagagcagcccagaggtggagcagagtcagagacaccgtttgagatccgagcacccactgactgacagccttcagttccaatccaatctgcactgcattctgggtactaaccctgcacaataaccagctgcaattgccaagaaaacctgtgcagctggtggtgagtgaaaaccaaggatgtgaactcaatgtgctgcagctgaagaaacagagttgtacctggaaccgcccagtgggttcaccttgcccactgcctacacagaacccatttatcaagacaggggaattgcaatggagaaagggtaattcacgtagagctggctgtgtgggagaccagagttttattattactcaaatcagtctccccaagcattcagggatcagagtttttaaagataattttgcaggtaggggcttgggaagtggggagtgctgattggtcaggctggaaatgaaatcatagtgggtcaaagttaggttttcttaacgtcttctgttcctgggtgtgatggcagaaatgattgggccacattactggtctgggtggtgtcagctgatacatccagtgcagggtctgcaaaatatctcaagcactgatgttaggctttacaatagtgatgttcccccaatttggaggtatttggggagcaatttggggattgctcagactcttggagccagaggctgcatgacctctaaactgtaatttctaatcctgtagctaatttattagtcctgcaaaggcagactggtccccaggcaagaagagggtcttcgggaaagggctgttatcaattttgcttcagagtcaaagcatctactgaattccttcccaaagttagttcggcctgtgcccgggaatgaacaaggaaagcttaagtgttagaagccagatagagtcggttaggtctgatttctctcactgtcataatttcctgagttataatttggcaaagacagtttcatacccagtgactgttttcctgagtgctttccagggtggtggccaggcagaggtgtggtcgagtcgggaggtgggatggttccagcctcaggggcctggcttcttcttccttcctggagggacaaaatggtcatcttcctcctgctgtagtgttttcccctgcgttttgttccttctgctatgtgtggatgtgttgggataagatagggcaagatgagcaccgggaaagggggctggcaagaggaagggaaccctgtctgttctcttccccttcccagtgatgctgcctctggagaaggtgaggaaaactcgcacccaacaggctgcaggctcctggggccagagctttctgctttttccagactccatatgactgatgtgaaaacgttgagtttcctgagcctgcttgccctctgggtagtctaactgctctgataataaaataagtgtagaggcactgaagtaaagaatttgcaataaaaaagaaaatgaaaaatggaagccataagagaaatgagtattggatcaagtgtgaagaatgggaaatgtcaaggcacttgataatttttctgctaacaaacagacattgtgaaggtggaagtttccatggttttccttccctgcgttttcttttgctattgtcatgagatctaggggcatgagggatttgtcatttgagtgttacattgcaacaaaaagcaaggcagaagtacagaatccacttaaatgagagtatgaacacaataggaggttttgctacctggaattagatgttgaattgctgctctctaaactttattttctatataaaaagctttaaatacaatcatttaattattcatttaaagtttatattaacaacatttagtgtgcacctgctatatgtaaagtatcccactaggtactattcatcaaattaaagccagctatttagttatgaaaataaaccatggcccacataccctgtgaagccctgttaaaagcaggcaacatgcccaagaaaatatgtttcctttgaatttcacagaaatcttagtttgaggaagaaaaatcaagagtttttgttataagccactatgtgtatgctctgaaacagttaatgtagagaacagaggtagtggccataactgaaataaggagatagtgagtgagtgtgtgtgtgacctaattcaagtttggtggtccaagtggtatttttcttggcctgtaaaaactacaggtatttgcaaaactgttctaaatagtaatgtaatagaagttttttaaaaattgagttagtgcatatgtttggactcaatttctccctcttttggttactatatatggttctaatttccagctgtgcagttactattgtaaattctcaacattaaaaaaattttcagatacaaattatttttattgatacatactttttacatatttaaggggtacatgtgaattctcaacaattaatattaaataaaaggagaagaattctgttctatcccagattagaaataccttagaatttctatttgtgtctatttccctccattccattattttcttcctcttcataccacatttatatacgtcttaccatttatttatatttatttaatactttacttcaggaaacttagtattgttctggaatcagaaagcccttctagctagtctgtcttgccaggtctttccgattcttctccctcaagaagcaagtggtggtgaccacgtcgacataagagatttcccgtctgactcctcccaccatctgtgtaggtcacagaacctcacgccaactggctctcttcagactgtggtcaactggaaaatcgagtcagatttcagaagggtgggaaaatgaacctagaaagtctaatgtggagaaagccttaaaatatatccttcatgttccacaatagtgattattatctttggcgatactgcaacataaataggtattcttggctagttcatctctggcggcaccatcttggcatttacactctacagaaaaggtacctgaggagaaagatggtccaagttacttgccacagatcacacagattaacagcagcacagtctgggtgtatatgtgtaatatatatctttttattatttttatatacaagtaatggttgtttcttgtagaaaagttaaaacaatgaagatgagcaggaagaaaaaaataccatccaaacacccagcaaataaccatactaatgtagacatattttcttctaatcttctaggtatgtatgtatacatatatgtacatatatatacacatgcacacttttttctaaacccatattgacctataacctccttttttttttacttaacaaaatactgggaatgtctttttgtgtttttaatattcagctattccatagtattccattttataattatactgtaatttaagtagccagccctctccttttggacatatatgttgtgccaagtgttgattacaataagtatttctgaaatgaacattctcacccatacatcttggtgctgcttttttttttttttctataacccaggacagtgctgaagtgcttcttttctttaatttcctcagttttagttcctagaagtggcaatgctgggctgttgggtttacacatgtttaaggttctgatgcatgtgactaaattaccctccagaaaagttctgctttaagttctacttaacgctttcccaccctgggacagctgaagactggccagagctttgcagctgcaatgatgtgtttaccacctcccttatccagcaacatttgcaattagcctccgaccttgttcctgggattgtttccggtgaaaattagccatgcctggctaatttttgtatttttagtagagacagggtttcaccttattggtcaggctggtcttgaactcctgacctcgtgatctgcccacctcggcctcccaaagtgctgggtttgggaatggtacctgtggatgcacctagaggtgtgtttagacactagctgaaatcactttggtctttctagcaaaccttagccaatgggctccactcacaaagggtcagcttccaagagcagattttagctcagggcctcttatgttcaggacaataatggagtaaaaaaacaaggctgaaaaccagaagatatgtgggcttaagcagatatgtgaatagctacccacataggaaaaacaaaacaaaacaaaacaaaaacaaaaacagaaaataaggtgggagtccttcttttacaaccatggataccttttcttttcttttctttttttttttttttgagacaggatcgctcttttgcccaggctggagtgcagtggttcgatcatggctcactgcagcctcaatcccccaggctcaagcaatcctccacctcagtgtcccaagtagctgggactacaagtatgtgccaccacacctggccttttttttttttttttttttgaaatggagtcttgctctgtcacccaggctggagtgcagtggtgtgatcttggctcactgcaacctccacctcccaggttcaagcaattctcctgcctcagcctcctgagtagctgggactatgggcgaacaccaccatgcctggctaatttttgtatttttactagagacggggtttcaccatattggtcaggctggtcttgaactcctgacctcatgatctgcccacctcagcctcccaaagtgctgggattacaggcgtgagccactgcgcccagcctggccaatttttttaaatttactttttgtagagatgaggtctcactatgttgcctaggttgatttcaaactcctgaactcaagcgattctcccacctcggcctcccaaagtgctcggattacaggcataagcctctgtgcccagccaatacctcttattatctaactgagcattgttaaattcagggatgggttgctgagggacgatatgacagattacactcgatttgatgtgtgctgactaaggcctgtgcatgcctagcattgctttagtcatggaatgaatcacactcaggttcagattctagtcctgccacttcctatgtccttgagcaagtgccttcatttatctgagactcactttccttgtccatagttattccaattgcatttggttgcagtgagtagaaattaagtatttaggctgggcacagtggctcacacctgtaatcccagcactttgggaggccgaggcaggtggatcgcttgagctcgggatttcgagaccagcctgggcaacatggcaaaaccctgtctctacaaaaaatatataaattagctgggtgtggtggctcacacctgtggtcccaactacttaggaggctaagacagaaggatgacttgagcctaggaggcagaggttgcagtgagctgagatcgtcccactgcactgcagcctgggggacagagtgagatcctgtctttaaaaaaaaaaaaaagggaagaaatcaagtatttaaagcacctaaggacagcccccagccccatggtagtgctcagcaagtgtttggtgaatgaatggattcatgctctacgcttatatagagtttactttgctttcagattgggttctgcttgctcattgtacttatcactatatgagaattgtattgtttattttcaaatttgccacatattgtctgtttctccatcaacacaaaacattctcaggagaagagttggttcccagtgcctgaaaacagtgcctagcacacagaagatggtgaatcaatatttgtggttatttctcactcacattccgtccagcaacccagtcttgttaccaggaggctgttcagcacaggacacttatcacaccatttgttgaccctccacttccccctctgccacttatcacaccattggttgacctgtgcttgcttccagccatcctccgttacctgaagaacgatgggaaggtgcatttggtggttttcaacaacctgcagctggcagacggaaggcggcacaggatcctcctgaggctgagcaatttgcagcgaggggccggctccctagagctctacctggactgcatccaggtggattccgttcacaatctccccagggcctttgctggcccctcccagaaacctgagaccattgaattgaggactttccagaggaagccacaggtaggaacccacaaaccattctctgaagtggaaaaatgagctgccagtgcctagggagtgcagaggagcgtgctgagaaattcctgctgcaggtcagtgggtctaatgccgcttgcacatcagaatcacctgcggagcttgaaaagcaagtgatagggggctgcccctaggacaaactgaatccgaatctgtcgggtggggcctagcatatttttatgctaggggcatcagcatatttttaaaataccaattctaatgtgatgccgaaattgagagcttgtgctttcaatgataagtagagactctggatacaattgtaacgttggaaaggaagggcaaaagtaaaaataactacctcagggtgatgacattatctattttcaattttctataatgaaaataaaaaagaatgattagaaactgccaagctttcataacagcattttcacaggtcttgtcagaacatccactaacaaaagggagcttagcttagctgcatttggtcttaagataccatcacctctgtcttctgttttactccaggttgatggtatttttattattctgtcattgcacctgctgtagaaattgccacatacatttcttttagaattttgtgctaggcagtgctttgttttctataaagaactagtattctttgtcctttccaataatgtataactggttaaagttcctgaatttcatccgctatataagccaatgtcaaatcagtaactatgttcttctgtaatggtccatattatttttgtctgctacctctcaatcctcactttccatttgttaattcattatattaatatatgctttagttacaagctactctgagccctttgtacagagaagcagggtgtaagcaataatttccattgcaagtaggaatgctgtgcagttttagatagtaatataaaaactatgaatctgatcctagaagttttgcccttgaacaacaggaagcatttttaatcagaaattccaagaaagctaaaatccgaggtttttggggatttttgtttttcagtcatatatagagagatttttaatgtagatttacatatggaaaaaaattaatagaaagatatgctaaactctctttctgcatccccatagtagcgcatgtaatcagaatgacagtcagaaattgtgtcactgcttatttcagaaattagtgttcaccaccaaataagtcaatttctaaaagtcaggactcacccctgacaaagtcatcagaaactgtacttactggaattttctcagaagctctacctccttagaccatggtagtgatcacagtggctcagtctcataatcacctactcactcattcagtcagtcaacaaatgggcacattctaggcattagtgctaccatggtgggcaaagccagtcattttcctgactctgcggagattatagtctgatgtccaatacaatatgtgttaaatagcacatgttgcctaaatcttagctaaatcaaaaagcagaattcctctgaaaatccttagctgtgctcatttctaaaataaggatgatgacttcactttggcagttaacataaatgttttgttgtatatagatataataaaggtgattgcaagcagcattcacaagataaaagggcaaggacattgactttttgactaacaatgaataatatcaacccgtaatataaaaatatgatgccaactacctaatgatcatagaagatatcatttattcattctcatatcccaaagaagtcagaggctttgctagacccttgagccaagacaaccaaaaaataatactgtttaaaattggggttaacaccttatttattattatctaaattccataaacaaattacagacaattcttaagaggctcctgccacaaaataactcctttaccatgtaggaaaagagcctttcgttttctcagctgtcttggtgacaatgccagcattttcctaggctactggctacttacatattcactttagtcaaaaagatagggctggcaggctttaggaaaaaatgtgatcctacaaaattatgtaagatgtcagagggtccaagtatacaggactacttgattatgaaaattgcgtgagtaggcaagcacattggcttttgaacagtgtcagcaatctgtggtatgaatgtgatttcttccaggacttcttggaagagctgaagctggtggtgagaggctcactgttccaggtggccagcctgcaagactgcttcctgcagcagagtgagccactggctgccacaggcacaggtgtgggctcttgggcagtttgcatgccttcatcaacacaaactccaaagaccctgaataggctgggtcccatcaccgaaaagtgggactgtcaacagagcagcccaacaaaacgtatctatgaaaatcagtctcttgaacaaaatccagggcacagaatattttcattatgcttttatttttatgattcacatggaatttagacttagtcagtggcatcattatcattattttttttagctgaattaaagaaattaccccaaattaaattcaaagattctgggtttttgaatcatcttgtcaggatgatttcctggggaataatttggttttgagtcacttagaaatgaccatcactggctgaaaactctttgccttttgctgttcctacaggggactttaaccggcagttcttgggtcaaatgacacaattaaaccaactcctgggagaggtgaaggaccttctgagacagcaggtaacaagcgggacatatcatcagaaaagccctcgtcttcttagagcagctccccacaagctagtggagctgcaggcctgcccaggcacgggggcagcctctgagccagatctccgggggcccacgcagccccgcacgccagggctctgctggaagttctctggaaatggggtccaagctcgtgatgaacacaccatggctctaagcagagcgggagccatcaagggctgctaacgctactgtaagaagtgttacagagagccaggtgcggtgcctcatgactgtaatcccagcactttgggaggctgaggtgggcagatcacgaggtgaggagctcgagaccagcctgaacaacatggtgaaaccccgtctctactaaaaatacaaaaattagccaggcatggtggtgcatgcctataatcccagctactcaggaggctgaggcaggagaattgctggaacccaggaggcggaggttgtagtgagctgagatcgtgccactgcactccagcctgggcgacagactgagactgtctcaaaaaaaaaaaaaaaaaaagtgttacatagatagctccacatggattctttcattcctggatgatatcaggcattccttttcaatccttttttccccttctcatttttaaaggttaaggaaacatcatttttgcgaaacaccatagctgaatgccaggcttgcggtaagtgcttttctagtaatgggctcgcctgagttggatgatgcaggctgatgaagggcttgcggtgaggctgtgttgaccgcagtttctgaaggtctaccacatagttggaggggagggaggaaaagttcaataggaaaccaaattttgttttgccttctgtatatcttcctggcggtgaatacgcctgtggatgattgtttttctctaggtcctctcaagtttcagtctccgaccccaagcacggtggtgcccccggctccccctgcaccgccaacacgcccacctcgtcggtgtgactccaacccatgtttccgaggtgtccaatgtaccgacagtagagatggcttccagtgtgggccctgccccgagggctacacaggaaacgggatcacctgtattgatgttgatgaggtaaaagttcacttagactgggaggggatccctaagtatcctcctcaccctgcagcttttggaaaaagaagccaagctgatgattaagggctgacttgggctgtcctccaggctccattgaaaccacttgcttggagaccctgagacaagggatggcggaaggagacatgacccaaggttatggctgcgtttgtcatttttcctctgtgtttccaactcttctactggtccattggctacagtgctgaggtttctgctttacacgctgacatttgcattggttatttctcttaaatagtctgtgctacaattttgtttttcccccacttttgcaaatgtggaaggggaggatttttctaagggtatatttcaggagtcaccgtggatttcttcaggcttcctaaaataaaggagcagaggggaatctcacaccaacaagggggaggccctgtaacctatgagtaactaaacgtgcccagggagggccccagaggaggcacatccagcaaataccagctatttgaccggctggcagagccccagaagagactgtttcaagaccctggttaggcaggccagcctagtggctgaagcctgcaatctcaacactttgggaggctgaggcaggaggatcacatgagcccaggagtttgagaccagcccgggcaacaagacaaaaccctatctctacaaaaaatatgataattactggggcatggtggcatgtgcctgtggtcccagctactctggaagatgaagcaggaggattgcctgaggcaggaggttgaggctgcagtgagccatgatggcaccactgcactctagcctgggcacaaccctgtctcaaaaaaacaaacaaaaaaaaacatggttaggcaatcaccagtccagttgcaaagcaatgttcatagcaggtagcaaggctgccaccaaaatgtgccttcaatgtgcctttctcctcccacccagcccaaggaaggctgaaaggagaagcgcaggggagagatgcaggtacataacttaggcacactgactccctggggctcctgcaggcccatggtaatgttagtaacactcagctgattaccttcgctagtagtaagcaattaagacggtctctagtaatccctcaattggagaaacaactgcatacatttcactgaactgcatctggtttttatctgtgaggtagaattttcctctttctgaaagggcaggaagtggtcatgttttttacattagttgaagtggtttaaaaaaaacaaaaaacaatctccaagattcctagagccttggaatagcatggacttgacaggacatggaggcaggcacaggccctgagggattacatggtaatgaagaggcaccggccctggctttgccttctcgaggtctttctgattgagtagttggtttgctgatgcttttggaggcatctaacagccagctaagtggtccagggacatagtcctttcacagagatttgcaaattccatgtcagaatatcagggagcttattacattgagaggtaggctggttaatatcaaggaccctttcaacatgcatgtgccattattctacagcacagcaaagcctactaaaaagcaacctcagattgtgtggtcagggattcagtgggtaactggagttggaagcctttatttccttttattattttttccaccaaaagatagttaaatgactaaacaagtatgtgcaaatagatgaagaaaagtttgagagtgttttctcggtgtggctaaagactttgaacttttttgtctccagtgcaaataccatccctgctacccgggcgtgcactgcataaatttgtctcctggcttcagatgtgacgcctgcccagtgggcttcacagggcccatggtgcagggtgttgggatcagttttgccaagtcaaacaagcaggtaggctgaagtcatggtttctattcatttctcatcttaacaaaacaactgtggttggttcccacctctttggtataaacctttacctccatgagcagtcaaggccatgtggaatgtcatggtgcaaaatgagcaaattaggaagtttttcaaccatttctgagtatttacatttataaaatctagaagggaggaagcttttaagaggggataatagagtatcactagaaaaacagtaaatggggtaatatggctattggcataatttcagtcttattttgttgatagctgttgagcattttgtcctgcagaataagttgagaaccacggagacaaaagctttgaaaaattaggtcacttttgtagagtcattgttgccaatcgaagctgtttcagagatgaggggattttaagagtagaaataatcccccaaggcaacctcccctttttcttatgtaagctataaattgccataaagcacttgagtacttcttgacagtctccatttatttcccaatgctctactatattctggtcattatttaactgactgactgtgaaattctttttgatgtttttagcccttaaaaatggttgttctataaatatattttactaccttagggaaattattagctttgaagaagggcaggggtttattatttcctagctgcctatcaaagggttctagagggcatgatttttttaagttattgttatactttaagttctagggtacatatgcacaacgtgcaggtttgttacatatgtatacatgtgccatactggtgtgctgcacctgttaacttgtcatttacattaggtatatctcctaatgctatccttcccccctccccctaccccatgacaggccctggtgtgtgacattccccaccctgtgtccaagtgttctcattgttcaattcccaactaagagtgagaacatgcggtgtttggttttctatccttgcgatagtttgctcagaatgatggtttctagcttcatccatgtccctacaaaggacatgaactcatccttttttatggctgcataatattccatggtgtatatgtgccacattttcttaatccagtctatcattgatggacatttgggttggttccaagtctttgctattgtgaatagtgccacaataaatatacgtgtccatgtgtctttatagcagcatgatttataagcctttgggtatatgcccagtaatgggatggctgggtcaaatcgtatttctagttctagatccttgaggaatcgccacactgtcttccacaatggctgaactagtttacagtcccaccaacagtgtaaaagtgttcctatttctccacattctcttcagcacctattgtttcctgactttttaatgatcgccattctaactggtgtgagaaggcatctcattgtggttttgatttgcatttctctgatggccagtaatggtgagcattttttcatgtgtctgttggctgcataactgtcttgagaagtgtctgttcatatcctttgcccactttttgatggggttgtttgatttttttcctataaatttgtttaagttaagttctttgtagattctggatattagccctttgtcagatggatagattgtaaaaatgttctcccattctgtaggttgcctgttcactctgatggtagtttcttttgctgtgcagaagctcttgagtttaattagatcccatttgtcaattttggcttttgttgccattgctttaggtgttttaatcatgaagtccttggagggcatgattttttagactagaaaagggaggccagctagacatataggaatgataagaagctgttaagagtcctctaaagacaaaatctctaagaacaaaccaaggaaacataaggtacttggtgtaaggtagtaaggagcacttctcaatagatttccagtaacaaggcagacagaactgaagtggaagggagccaccttgctaaatttaacagcaaatgttactgcattccaaagtcaaagaaaataaaaggaaatggcgcagtgtccagaaacaaagagaaaactcaaagccagaactgtgactagagctgatgccacagcagatcctgggaggtgggagttgggtccaggtcttagtaacagggacctggcttttaccacctgtgtggagtggatgcagcaatgtagtctgggaactttggaaaggcctaacacccctgcataagtccaggaccctcagagaaccaccttatcaattacaaggagacaggaaacctttagtagccctaagaaacaacaaagaagctctttagctttaatacatggttgacaaaaatgaaaattgcctacagcaaatcaaagcaccacacttgtaccacatacagttatgagttccaaatctgttatacatataatgcagaaacacaagccaaaaaattaaaataataaccagccatgaagaagtgaaatccccagggctctgactcaagtcaaaggcacaccactctgtaaagacatgccaaaattcagggccaatggaatgcccacaggcaaaatttgggctactgaagatatgcttataaacaaaaatggcagtttatataaagaaactcccatgaggaaacatgataaatgcaaagtaaatataaaaaggtaaagaaataaataccatacttaaagaatagggcaatgccccaactgggcaacatggcaaaatcccatccctacaaaaaatacacacaaaaaaattagccgggtgtgatggtgcatgcctgtggtcccagcaaccttgggaggttgaggtgggaggatcacctgagtctgggaggtcgaggctgccgtgagctgtgattgtgccactgcactccagcctgagcgacagagcaagaccctgtctcaacaacaacaacaaaaaaatatagggcaatgtgagaaaaacagataagtttgtaaaacagacaaataaaacttttatcaatggaaaatcgttgaacttaatagatgggcaaaacagattagacacagcttagcagggagttcatgggctaggaggtgaacctaaagaaatcatctagaatgcagcacagagaaataacgacatggagcatataaacaagaggttaggagtcaaaagaagatattaacaagaaagttcgatattcatccaattgtagttccaaagaaagactagaaagcagtcgggggaagctgagaatgttccagaattgaaaaaagctaagaatcctcatttaggagaactgcattgattcccaagcaagattaaaaaaaaaaataaaactttcctaacctaaaaaggtgatggaacagatgaattatacaagttgtcttttctgaataactttcaataccatgaaagcaattctcatttgcaattagattaagtacaaactggtacaaatgcaagggagatggcacaaataaccctcagattaccattctacccgaaattccgcatcttcacttcacacaaagatagcaaaacaaaggagatttatttgcatttctatttaagcagcatgtctcgctaaactttctttgaacttttctgcactaggtctgcactgacattgatgagtgtcgaaatggagcgtgcgttcccaactcgatctgcgttaatactttggtaagtatttctcacagctgttgttatcaaagcagaaccggttattaaaacaagtgtatgtttatagatcatagcttccaaacacacctagaacatgtgggcataatatatttgattggcagaataaaggcaaaagtttgtgctgaaaaagtgtttaatatgagtaattttaaaagtaatttttatgtaagaataattttataagtgccaagttctttattttctatcaaagttgcaatattaggctattagataactatttattgagtaaataattattactcctgtattttaaaattgtgaagagcttggtagtttatattaatagttcagtattttactggtgactacacaatccccaaatggcattatttattttcataaaactttcaatcatggggtcaggagatcgagaccatcctggctaacatggttaaaccccgtctctactaaaaatagaaaacaaaattagccgggcctggtggcgggtgcctgtagtcccagctactctggaggctgaagcaggagaatgacatgaacccggcaggcggagcttgcagtgagccgagatcgcaccactgcactccagcctgggcgacagagcaagactccctctcaaaaaaaaaaaaaaaaaaaaacttttcaaaacttttcattgtattaaattaaagtgcttagcacttagggatgcctataacttaagtattcagatatgggttttatttctgaaagttcctgtcaaactgtgtccaagatgagagatgtaccagagttgactatcaagaaaagaactactgattacgtgtatgactatttgaaagttatccagcctctaggttccttgtttccttgtaagtaaaaacactttacatttatcaagtcacttattttaatcctcacaacaacctcataaacagggattattattatccccattttacaattgaagaaactgagggacagaaatattacatcattaagtccaggcatggtggagcatgcctatagtcccagctcctcaggaggctgaggccgaaggatcatttgggtacaagagtagtttgaggctacagtgagctgtgatcgccactgcactctaacctgggtgacagagggagaccctgtctccaaaaagaaaaaaaagaaatgttacgtatttagactaaggtcacacatcttccaggttggctacagagcctgagttcttctccgcaatgctatattgcttaggaatagatggggatttattgcttctcagcttttaccaggacaaagtagtctgcaaatagatttgcgagatcttggtgtaaaggtaataactgagccacctagagagaaggaaagtagacagtaaatagaactccaggaaaccccaaaaacgaaggactaggccaaggaaaaagagcagaagccagaaaaaggagcgaactgatagcacagccagggaggctgaaagatcgagacaagtcattggaaagcatgcattggatttggcaactaagaggttgtgagtgacttaaatcattaaacaatatatatacttcaaatggatgtcttttacgacctgtaaatgttatgccaataaaactgcataagatgaaaaagatctaatgtacagcatggtgactgtagttaataatactatattatatatatgaaatctgctaagagagcagatcttaagtgttctcactgaaaaagaaaaaaaggaaggtaactatgtcagttgatggatgtgttacttaactgactgtggtaatcatttcacaatgtatacgtatatcacatcatcacactgcacactttaaatatattcagttttgtcaattatacctcaataaagatgaaaattttaattttcattttttaaacatattgtataatatttattacatatatagtgtgcagtgtgataatatatattatatatataaaagctaaaaaaacctggcccctgaagtgtcattgcagcggagctgacagctcatttgtcagtttctcagcctacctcatcagaaattctcaatgcaggccaccagcatttctctgtgcacccattcctttgtcattccattgtaaaagagccaaaggaacagcaataagaaaaattaacttgctttttaagcagatcatctccctgtccccagagtaaacttctcacaccacctcccaggacttcactggaacttttgacctgtcccctatgccctccacggtggcgcgggcaactcagtgtcattggttcacagtccagccttcttccttcacttctattccttctttgtctgagtggccggacgcagcctccagtctgatggtgttttcatcaacattcacatgatcttacatgtaagcaaagaagaaggcatggatctgatgcctgattcctgccagcaatgagtacctgtgaaaatatacacaataactgtacctttgctcaaactgtacctttgcccacagctttcagctcatcacctgatctttgttccttgcagggatcttaccgctgtgggccttgtaagccggggtatactggtgatcagataaggggatgcaaagcggaaagaaactgcagaaacccagagctgaacccttgcagtgtgaatgcccagtgcattgaagagaggcagggggatgtgacatgtgtggtaagttgttttttgacttcctctatcatttttcctcttccatttttaacaccacctctctccagtttctatgtgcttcagggtaaaagtactccaaaatgaaagcattgcaattaaatgagcatggagtgtaataggaacagggtccaccgagtttgtggggagcagcctgacatccatctaaccatcagctgccttttctctccctcttggctggggggcaaccctgtccacttgggtacctggatgccagagcctccggtgaagccccagctcccaagcaccttctatggaaaggcccagaagccagcagcagggaggtgaaggaacattcttctcccctttccttcttctgccccatctacctgcctgtataatgacaacatacctgctgtcatctctaactgtcctcatccttacaacttccagagtctgtctgccttgacgctcctgttgggggtgggccatcgtgtagaggtggggactgtcatagtccctccgggagaaaccttccgtctttggcaggtgactggcagggccagacggcgccatgctgtatgtctacctccactccaatcagggacagctccatgaatggtcacgcttcctgtgcattctccagccacggagctggtctggggaggggaggctgggaagagagtagagcagtcacagcagggcctgacatgggtcccatgctgagcttgtagtgggccctatgtgaaggagagggcatgctcctgccatccattcccaaatccaaggatccagagtcctcagcctgccatccattcccaaatccaaggatccagagtcctcagcctgccatccattcccaagtccaaggatccagagtcctcagcctgccatccattcccaaatccaaggatccaaagtcctggggatcctaggcactgaaaaatcagcagacttcagctgcccccctcctctgcacttcctgggatgccaggccctcggccggtggcccgtcagactctggggtcactggttcacagtgatcacccctgagtagcaagatggattctcggagcccttttccatctttatctcaaagttatgcttctttatctttatgcatacacaattttccacaatgagcctaccacttttcaaataggaaaaataagagtcaaaaatgagttaataaataaatataatgaagtcagccctccttggcaatacagatattctgtaacaaggtcagatggaagaatgtggtgtatcagagggggaataaccccagcaatttcctgaattcctcatggttgggcttgtttattaccaaaaagcagtcattgagaaacaagtgtatatctctgttgaaatccccattttctgtgaacaaattgacaactcccctgggatgatgggtgatggggctcttaatatgtttttgaatttgtaataaggcacaacgacagatggtaaaggattaataaacttggcgtgactactaaaataattgaatctgccagaaaatagctcattaaaaatgtatttgttcctagaggacattttttcctcattaaagtgagtcaaggatcagcctcgtggatcagccttccaggccttccaaaggccctgctggggcaagtgagcaggaaccaggagcccgggagggtctctctggagttctgcctcctaaatcctggttgcagagggagagcacagatgattgagaataagcaggctgtggctgaggaagtcactggtctgaaagcttttgggtggtgaggccaggaaatttaacctgtgctcacataagtctgatttcccttggcccagactctgctcctcagactctctccctcttccttcctttacctcccgtcccaggtcagctttctctccctctgcgtttccagttccctgtgaccttctgggtcccctcctcccatctcccttctgctgctctgcctgttcctggaagtgggagtgggagggagagttttctctctgagtctccctttatatctttgaatagtgaaccattacactattcaagtgcaattaaatagtttctaagccccacccaacaaggctgagtgactctgggccctccccctgggattgagcaaaggagcagagaggcccttgtcagccaccagcttcctgccaggctcagcttcccaggcctctgatgggctttccctttacagtgtggagtcggttgggctggagatggctatatctgtggaaaggatgtggacatcgacagttaccccgacgaagaactgccatgctctgccaggaactgtaaaaaggtaaggggtgtggggtggcagtaggcacacatgcactgtggctttccaaagtcacatcttctatggggagaggttctgtggatctaatttaaaattgtacttgtaaagtagctgcatctcagaggaagtgaaacagccaccaacaataaagccacagtgtcttgaggtcagaaacagttactggcttaacacaaatgtaggatgtcactcggaactgcattttccccctaaggacaactgcaaatatgtgccaaattctggccaagaagatgcagacagagatggcattggcgacgcttgtgacgaggatgctgacggagatgggatcctgaatgagcaggtacctgcttcgctgggagggcctgtgaattgccacgtaccagggatgatgggagaaagcctgtgatgtcaactatgtatatgaatcatcccaaatgttagtttccatgcctgcattccacagcactgcagctttttaccctataagattcacagatgtttgaaatataaaactgacaaacttgggccaccagagtgctgatgcttcacaacaatggaggaagtggatttagtaaaagtctgagtgatgttctgtcctttcatcttttaggataactgtgtcctgattcataatgtggaccaaaggaacagcgataaagatatctttggggatgcctgtgataactgcctgagtgtcttaaataacgaccagaaagacaccgatggggatggaagaggagatgcctgtgatgatgacatggatggagatggtagatttatcttgcttttgtcttttatttggaattcagttgaccttgttccattgttctctgagagagtaggaatagaatgactgattcggagccttccagctgtgggtggctcattgtggcctgcatctggaagacccaaggtggacttgtgtctatggaaggagaccccacagcccactccactacctaatggctctggatgtttccaggactctgtatcattgccagaaactttgtatgaccccttcaagcagtgtcttgtcagagtgtgtctttatggggtatctcccttcccatttctacctgtcctcactctccactatcctttctacatgtgagagacccagaagtggagaactgaatgagaaggcattgagcagggtcacagactatgcatcacaggctacacatcccattgtgggcccttgaaggaaaaacctttttgaaataccacctgccccaacacacacatacacacacacacacacacacacacacacacatacaccactccagaacatgcacacccccctaaaacatgacctcaccttctgcaagcctaactgatgacccatttccagtggtatatgctggtaagcaaatcacagaaagccctagttggtagcattttccagtttccatgatgtaactccgcattgtcctcattgctgatttcaagctaccaatgtgacatcatcaaacacaaaactgaaaagagagggacacaatggacccagctccagcacaacactgcctagagccctagggtctcagtcatagctcagatacccacgagatcctccctctccagggtcagccatacagccatcatgatcccctcctcgtggttgctatcatagcccttgacatcttggacaaattagaattcagtcgataaatacctctgagagctgttcatttttaagtctcccagaatccgtcctttgaagctacctctggataactgcagaaaagggtagtctctgtgtgacactggcccaggcagaagtgactcaccatgcgcctgatctctccagcacctagaagaagtcagtgacattcccctgactcaaggtagcatttctttctcacaggaataaaaaacattctggacaactgcccaaaatttcccaatcgtgaccaacgggacaaggatggtgatggtgtgggggatgcctgtgacagttgtcctgatgtcagcaaccctaaccaggttagtaggatactggggaattcaaactccaggctgaattcctctatgcaaagactcatttaagacgggtgtctagaaaaacagcagagcctcttagctgttgccacttacctaacaaagcagaggtggaaaaatgacacactgtgggcctgaagatggtgggatgaacaccacacaagatctgaagccctagggactatctcccaggctgtcgattgcctgtgaggttagtaacacgaacttcatgatgctcaatacaagtatttttcctgcagaaaggaaaacggagcatggaaattaaccattgggagccttgtgtccctttagtccctaaacccctacacagcctatgtatggacatttcagattaagttcagccagggatgtgttgcatctcccttctcactcctcctccctgtctggataattgggtatgatgtgtcatttatttttaaagccctgagagaggggagtcatggttgccctctgtgactcactcatgattttggccaaattgcaaattgcagaagcaaagcaaaatcaacctgccttctccccatgcctatggctggctccctgtgacccgtgccagagttccatgcctccacctgccaccatgctaccccagcgcccctttccaatcagctcatctggtgtgtgggcagcccatccatgtagcttgatattttagaaggcttttttgaaaattcagcattgtgcctacaccaatatggtgttgtccttttgcagttttgcaccaccccggttccagagaaataattccccaaatccaatgatgatgggtgaggtctgccttctctggaacattcggtacatgcaggcccaggaataaataacatgtgctgttctctttgcagtctgatgtggataatgatctggttggggactcctgtgacaccaatcaggacaggtatggcatgtctcccaactgcagagagacagatgcaaacatccggagagggtttttggtttgtttttttttttgaggcggagtctcactctatcacccaggctggagtacagtggtgcaatctcggctcactgcaagctccgattcccaggtttatgccattcttctgcctcagcctcccaagtagctgggactacaggcgcccgctaccatgcctggctaatttttttgtattttcagtagagacggggtttcaccatgttagccaggatggtctcgatctcctgaccttgtgatctgcccgcctcggcctcccaaagtgctgggattacaggcgtgagccactgtgcccagcccggagagggttttaaatttcagaacttcctgctgctccattccttgggatctttctgggtggactgagctgctggtgggataatagccctgcctctggtcagaattaccatgaaaattctccctgaaagttctgtatagggtataacggtgtcagaataggttactaggcactccagcaagtgagatctatttcaggagaggtaatatagcatcatgcttcacagatgggctctggaataagacagctagatataaatttcagctccttctcttacatgccagctaaccttaggcaaattacctaatacttttgcctcaattttctcatctgtaaaatgaggatgacaatagatctagctcataggaccatcgtgaagattgagttgatccatggaaagtgctcattatggtttctgttatatacatagcactcaatagacattagctcttttatttttatattctttcagctcaggaaaacttcaccatcatcccaaaatagaaggctgtcagtttgctgagggattgctattatttcctggtccttgaaatttttttaattcagttttccttatttaagtggaattgttctgtggaagtgagttttgtgaaccctcctagctcaacacgatggagtcccacattaagactcaaggctggatcaactgatcagattctggaagaacatcaccaaaaacagacgtgtgtcactcagccctagcggcacctgcaacccaaggttctaaacccttttgtctccatagggaattcttacaaaggcagccaggacaaggatgagagggaaaggattctaaaagagaaagcaaaaaaagatgcaatttctctcctgatacctggatcagaggttgccctgcagaaaaccagttcctgacccaaaccttactcaaggacagctcctatgaagccacagctctctctctctttttttttttttttgagatggagtcttgctctgtcacccaggctggcgtgatctcggctcactgcaacctccacctcctgggttcaagcaattctcatgcctcagactcccacgtacctgggattacaggtgtgtgccaccatgctggctaatttttgtatttttagtagagacagagtttcaccatgttggccaggctggtctcgaactcctggcctcaagtgatccacctgcctcatcctcccaaagtgtgcatctctttcattatgctctgtgtccttgctgcaaagtacatatagtcatccctcagtgtcccagggtattggtcccaggatacccctctgcccccaggataccaaaatcctcaaatactcaagtcccttatataaaatgatgtaatatctgcatataacctatacctgtcctcctatatgctttaaaaatcctctctagattacttaatacctaatacaatgtaaatgctaggtaaatagttattatactgcattggtttcttatttgtatttttttggtgttattttttattgttctttttcaaatcttttcaatcctcagttggttgaatctgcggatacggaaccgcggatacagaggcctgactgtactagctaagtgaacttaaacatatttcccagtctcttcacatctcaacttcttcatctgcaaagaggagataaataaatgcatcgcacaggttatggtgaaaaatcaagataatgtaggtaaagctcccggcacagtgctggcccaagggtgacatgcagaaaacaggggccgtgttattattggtatcacagtacaaggaaaggcacatcagcaacagagcctgacatcagatgtccctctcctcttccgagaggaaggtgggactgtatcctgacaactgccctaaatgatgtgcgtcaagaatgttccctggtgcaggtcatcttgcactctgactactatctacattaatttctaaaatatcctgtcccaccagcctctagatatttgcccaaaacaaatgactcattctgctatgttttaattcccacaaagttgaaccttggagaagaggataggaactgcttgtttttgcataaaaatgttcagggctacatagaacggctgctaatggaaatagctcagtcttgtgttttataaagcagacctgctgcatgcacagggattctgctgtttgagccacatcattttctgcttgtcaaggctgacttcactttcactggaccctttctgtccccctgtaccatgtggtaggtgtggccctagagcatggtctggtccctggcttccctctccaaaagggtgcaggggcagctcctggcccaggacaggccgcaggtggaccaggtctaaaggagtgctcattcttttccagagtaaccatgagaggtctcagactccaggacacctcttggaggcagggcagactcatcttcaggtggcccctcagcccagaaagtcaggtggacagagaaggagagttctgagaagtcctttagaccagcactgagcccggcctacacactctcctcgagaaggcgtggccctgttcactttgcccttctccccatggcgttcaggtctgaatcctcattggatccactagccagggattgtgaagagtaatataacggaaaacactgtagggcttcctaagagtcagcactttttcatatattgaaatttaatatgcaacattctgattttcatcatttaatctccataacaactctatgaggtaggtactattctcattttacagatgaggacactgagccatagagaggtcaggtgtcatgcctgaggtcacacgctgggcacagtggctgagccaggatttacactgaggctgtctggttccactgcctgtcattgttcccctcacacatcctctgagttgagtatcatctagcagttcccagggactgactgataggagcatctggtcataaatcatagaaatagacccttatcttctttagtaggaaatgactcacttgttttaagaggttggggatgggaaaattgtctctgaggcccatagggcagccttatctaagggaatgaccccagtgggtttgattttaagagccaaccctggtttaaaaaaaacctcaagcacagactctccttcctaaaaatggatccttcctgttccctgctgaactgtgagccacatcacctgtcctttctcctgcagtgatggagatgggcaccaggacagcacagacaactgccccaccgtcattaacagtgcccagctggacaccgataaggatggaattggtgacgagtgtgatgatgatgatgacaatgatggtatcccagacctggtgccccctggaccagacaactgccggctggtccccaacccagcccaggaggatagcaacagtaagcaggctcagcccagagctgcacagcacccctgggctcccttcagccaggcacatgggggcacgcctctctccaggcaccaactcagaatatccccagctcccatcagctgcttctctacacccagcttctctgcatagctgcagcttgtgtggacagcagatatctggtagacaccagtctccaactcagtcaggactgagctgctttgcatcttcctgaacaaccctaggatgccatcacacaggtcagggaagcagccacacactgtggctcagtccccaaagggcttggagagctgctccaccatcttacctgtcacctgccaccttccactgggagtcccagaaaaggagcaggatagagagaatggcacagtagaagtggtatatgctgggttcacaaacacagatgcctgcaggtgccaggcagataagaaaatgtctgcaccaagccagacatgagacagcagggagtgttggggactgaagtgacctggagagggcatgcccatccacagcagtgcacatgcaaaaatgccagcacgttagctgaacaacacacacgtgggggccaccagaagttagtgttagagatattctggtaacaataatttccctgttttctacacattacagtccagaaagtgctgtagacatttgcttatgtgaggtcaagcttaagatccaccagttggtgaactcaactgtaggtaataagaacttcttgaggacagagtggagggcaactgctcaaattgatctttcaaaaaactctgggaggactggcctggtcacccagtacaaggactccagaatggggcctggcaccagctcagacatgtccccagggctcctctcccaacactgatgggaaatcatggccctggttgtgggagcttgagcccttctgttcctcatgcagcccccttccctgccaaggagtggcggtgggtgtgagcgctattgagctcctgtcctttctccaccccactcaggcgacggagtgggagacatctgtgagtctgactttgaccaggaccaggtcatcgatcggatcgacgtctgcccagagaacgcagaggtcaccctgaccgacttcagggcttaccagaccgtggtcctggatcctgaaggggatgcccagatcgatcccaactgggtggtcctgaaccaggtgagtgtcacatgggcggcaatggctcagccttgcctctcaacagaggcccttctgatagtggtaggtcatgtttagagggtgcagacaataagccaggcattcttcacattcgctcttattcctcaacagccctatgacagactacttcaattatgcccattttacagaggatgaaattgtctgctacagctttcatgattgtagcagctttaatgatggtagcactgtggtaagtagctgagatgactggaattgggacccaggcagtctgaccctagaacccacacttctgatctctgcagcagactgccttctgcatatcctcctcattgtgtaactaagaagtgcaggcacagagaggcttagtagattttccagagtcacagagcaagtcacattgattagaagtatatgttgtatgctccccagttaagggcctgtccaatcagcttaagtgacagtctcagcaaacttatttctattcagctttgagcttttttttaacctttacaagcacatgctttctttgagcacataacacaatagagcaactatttcagataatgaaatctttatatggaggtcagacatcactggccactcactcatatggtgcctgaggttttgagcttccttaaggttacttggccccttcaagactgttctgaactccctcaactctctctgcagggcatggagattgtacagaccatgaacagtgatcctggcctggcagtgggtatgtccagggcctcagttgccactcacatagaattcttccagctactagtgtggtttgtctattgttctaatcttatctggtccctacagggtacacagcttttaatggagttgacttcgaagggaccttccatgtgaatacccagacagatgatgactatgcaggctttatctttggctaccaagatagctccagcttctacgtggtcatgtggaagcagacggagcagacatattggcaagccaccccattccgagcagttgcagaacctggcattcagctcaaggtattggtggtttgaagtcattcatctccctttcttctggacctctcatcttttttcagatattgtgttttcccatgtggtacttagttaatctaaaaaaaattgatgcatttatgctaacgttagagtcagggaagactacagttgacccttgccttcattcctgtgtgccagctacattctaacctctcatggtgggaatcccagcctacatgaggtcagagagagggaaggtttagagtgcatcttcaggcacactgtgttggaaactggctaataaatttcatcgataggtccaactttgtacaggagggctgatgggctacttctgtcactcctgctaggacacaaggctgacttaagtagccagacgtttgataggagccctcattgggcaaatgtagggagcaatggatgtgcagcaggaacaaacatggaatgtgtaatggaatactgggcaaggcttagtagtaaaaggttggggtcacctccatagaaatgacatttaagtgtttatgctttgttctgaatccaaggcagccggattataaccatgactataacctggatcatcacttcagatccaggaagcaggaagggtggtgcctgtgtcctgtcctaaaaccttgcttgtgtcatcatgcaggctgtgaagtctaagacaggtccaggggagcatctccggaactccctgtggcacacgggggacaccagtgaccaggtcaggctgctgtggaaggactccaggaatgtgggctggaaggacaaggtgtcctaccgctggttcctacagcacaggccccaggtgggctacatcaggtaggtagaggccccatctccttaccttgctctagaagcaaagcattctccgttctgcatcccagagccttcatttccctgagcaattctgacctaggatagtccccaaggacatgccaggacttttgtgaccgcaggatggggaacctagaaaagaggtgggagagaagatattcagggtcagaccacccggacaggacagtaggaccaagatggggatagaaggagcagagctgaggggacgacccagcgttgtggggttggtgcatttggatggctgtgcccttctgccatgctctgcagagaagcctgagggtggacatgccaatcggtatgaggtaagaggtgtggcagggtctcttctccacaccctcccctgtggcacctctgggccctgtgtaatcacttactagtgcacatttcaccctgactgcagcactatgtcccttacagtctgtcttccctgctggatcacaaactgcatgagagcagcgcttgtatctttttttttttttttttttttttttggagacggaatcccactctgttgccaggcaggagtactgtggcgtgatctcagctcactgcaacctccgccttcctggttcaagtgattcttctgcctcagcctcccgagtagctgggattacaggcacgcgccatcacgccaggctaatttttgtatttttagtagagatggggtttcaccatgctggccaggctggtcttgatctcctgacctcgtgatccacccgcctcggcctcccaaagtgctgggattacaggcatgggccactgtgcctagccatagcttattattttatcttgatctccccagtgcctagcacaaagcctgacatctactacacgtggcatgaactgatcatcatgtaggccaaagtagtctgacttctttctttataggacttttttgttgttgttttttaagtattctcgggagttaggaggcttagggctgtgtctttgaaatgtagatagtgttcttcttcatttgaacttgcagatcaacacccatcctagcctatgtaggatatttaggaaggagtactgagtgcattctcctcatcagggcaggaaagcagccttgtggaaaaaagaaaatcatgagggcaaattcatgttttgtttctctttgtgacattatgtcaaatgtactctttttgtctcacagtgagatgatcatgttctcagccctattaagcccaatgccccttttttattataaatattttgaaatgcccccttttccgtcccaaaatggaatcatagaaattacaacctacctacacgtataatctagaaaatcaatgtgagccctaacaatatcatagagaaataagaataatttataacaaaataatttaaatatttgagcacagccacaccagaagacaaaatgaaacagacacttgcacccatgcctagaatcactacgaaggtgacattctaacagactgttgtgtcagtgacttaaatgtttgttacactggttgatgacagcaatgtaaatttctcaaatggtacacattttagaatgttaattttcaaacaaattttctcaatttaccctggaaaatatagtttatattaaaatttgtgcaaaatatacttgctgtttacaagtgaaagtgagtcaggttctaggccctgatagttgctctttacctaccctggtgtctgaggaacactccagaagtgtatggaatgcaggacaggttttgattgttctcgccagggcattgctcgccatccagcatccctggctgccatcactcagtgccactgtgacaacccaaagtgtccccacagattcctccaactctacttagggagtgctgtctcctgtggagaatcattgctctgagattccaccaaaagatataaatcagaccaaaggaaaagccaaagtttttaagcatggtatctagacaaggcaactcacatgacaataagacacaaaactttctcactcaagatagcaggtttggtttggtttgatttttaactcaagtttgatagtgtgaccaacatcatgttaggccttgtgagagacagaagttgggaagaaacaccccccacccccctccacacacacacggacacacacggtccctgccctcaaggacttccagtctagtaagtaagtggcaacagctacagtacaatccaggtcagcgaaaaatggagcctaaaacagagcaaagaaagacgcaggtacgtataagaagtggggcccctgggcctcacagtgggcactttaccccgggttggatttcatggaggcccctccggccgtgttgtccgcagggtacgattttatgaaggctctgagttggtggctgactctggcgtcaccatagacaccacaatgcgtggaggccgacttggcgttttctgcttctctcaagaaaacatcatctggtccaacctcaagtatcgctgcaatggtaatgtgcattctcgttactgttcaacattgttactagaattagtcaaacactgccaccttatttttataccgcacttcccccccaaaagcccaacgctcataccacatagtcattaaaacctgatagtccctgtgtaccagaagtaaaaagcagatcacatttatcctattttatccatgtggaaattaagacccatagaatttaactgcatggtttagggtttggggttcagtgagaaatccagtcagatttaatttacaggaagcctttattttcatgtggttaaaacataatcacagatgcaaaatccattctgcctgctgattttctgcacggccgggaaggagcactcctgggctttaagccaacggtttgcaaagcagcctgcaggagaaaatggcggcgagggcctgcggggcgtcctgggcgggctaacagcgccccctacaggacgcctgagccgcgggcgggggtccggggtccggggtggaaggagcctcgctaacctccctgtgcccattcctattgcagacaccatccctgaggacttccaagagtttcaaacccagaatttcgaccgcttcgataattaaaccaaggaagcaatctgtaactgcttttcggaacactaaaaccatatatattttaacttcaattttctttagcttttaccaacccaaatatatcaaaacgttttatgtgaatgtggcaataaaggagaagagatcatttttaaaaaccgtgttgctcagacattgctctcacgtggctcaggctttgaggtgcccgttctcggagggatccctgttaacttgcagggtggtagtttcttctcagacccggtggccgataagatgagcctatgcgtgaatcacaaggcccaggccagaggtctcagctggggtccccccagtttgctccatacaaaacgcctaaccgttccatgctcaccttggcagcctccttatttcgggtaaggggtctcagaaacacgtgtttggggtggcaccttccctagggaggcgtttttctgacctagtcctgggacagatttgcccaattctttctgatgctgtcatcccatcccacaccttccacagacttctattctggccccttcaacgtaattcttaagcttatttatatatttggctccccctagtggactgtaagcatattgacaataaaggatcatgtcattacaatcaatatccccacagtacctggaatgtagtaaatagccagtaaatgtttactgaattaataaacgaagaatgaatgaatgaatgcctcttaaaggacagtagagtgtacatgatcataaaagtcctcctcaactcaaaaagtcacaacatatcctctatttgtggtaccagtagctggatgtacagcacagaaacttgcctaatttgtacactagcctttcttgtatttcaattgtaaatcaagatccaagcaaatttttataaattctctagaaattttgtttcaaagaatattgctgtgcggttatatattttcttattccagaattcctagagatatattaaatcatgtatgaagaaaaaaacaccacagttttatcatgactttaacagtgagaaaatacaatggtgcatgcatgagatctggaggatttctggacatcctcctctcatgtacagcctggagatgtgtgtggccttgtaatccaggacatctgatctcctacatcaaaaactccaatggggccaggtgtggtggcacttgcctgtggtcccaagcactttgggaggccaaggcaggcagatcacttgaggccaggagttcaagaccagcctggccaacgtggcgaaacccatctctactaaaaatacaaaaattagccaggtgtggtgccacttgcctatagtcccagctatttgggaggttgaagtgggagaatcacttgagctggggaggcagaggctgcagtgagcagagattgcaccactgtactccagcctgggcaatgagagtgaggctggtgaaaggaggcagcaacccacaccatgcccacccctggggcagcctccctgttgtcggctgtgcaagcccaagaacgcagtatgtccacaggaaacagactctcttggttaaatcttttgtgtctataactattttagaaaccatgggcccacaggagatccagaacataattccatcccttagggagcttattacatttttgggaagacaaaacttgttatttatgcaaaacaagaaacaaagacgcatgtagaaccagcagtgtgctgaagccaactcctaccagctcataagagccaactattcaagttttaggaatattgtgagccagttaaacggttggtagtttgaaattggccatggtgggagtatttacacagaaactggcaaacactacaaatcagggctccagagaactggttgttaaatatttatcagcacacaagtgattattctaccttgtcctattcctagttggccctccttatatttttgaagctgatgtagaaaacttgaggctttcagaaaatttcttgcataagaaatgaagtaagaaaagtgaaaatgggtggggtgctatggctcacacctgtaatcctagcactttgggaggcctaggtgggaggatcgcttgaggtcaggagtttgggaccagtctggccaacatggtaaaaccccatctctactaaaaatacaaaaattaggccaggtgcagtggctcctgcctatactcccagctcctcaggtggctgaagcacaagaatctcttgaacccgggaggcggaggttgcagtgagctgagatcgtgccactgcactccagcctgggcgacagagcaagacgtgtctccaaaaacaaaaacaaaaaaaaaaaaaagtgaaaatcaggaagcacttgagagaagctagccagttgcagactgacgggatgagctagcaggtgtggtatgctctcccccaggtaactccctgggcttcttggatacttgttatactcaaccttagcacaatgactcaaattcctattacagttccattaggttagtaagagcctcatttgaatcttacacctctaggactgagtggccatcagtctctcaccaactagtatgaattcattccaatgcccattcacctcctgacttttcatggagatcgagaagactgaggagctgggcatggtggtgtgcacctgtggtcctggctacctgggaggctgaatggggaggatcacttgagcccaggagttcaagtccagcatgggcaacatagcaagatcctgtctcactttttttttttttttttaagtactgggggaatgggaggcgtggctgggaaagaaaagaggcattgtcactgtgggggaatgggaggcgtggctgggaaagaaaagaggcattgtcactgtagggaaaagatcatggctgagtagaatcccacgggaagtgtgggagatctctgggggcaggatgagggcactgggggcagccagaggaggcctgggggcatgggagcaggtgcacaaagggatgtgcagccctttttgcctacactcaagaaaaaggaaaaaaaaactcttccttctccccatccaggttattagtcctaggctccagaagtattatggtgattatccttaggttaattttggagacaggctatagagttaaagagaatgaggaagatatagaatccagccacctgctattgaaacatctgtaggcattttttattgcctaggctagaagataactgggaacagactcaagcagcaaaaaagaatctggtccagaagtgaggccgtgggcaaactagatactgtacagcataaatctaggggtgagaggtggggtgcccctgtttgggatacacgcctggggtccccagtaacatcgggactgtaagggtggctcaacctttcagtggcatgaagaaaccccctgcagtgtccacagctccgcatcttacagccccgcccaatttggtcataggcaacctcaggagacagagacgctcaccccaaatttcctggggcagtatagtttccacagtgggtgagggtgttttattccagagaaataattctagtactatagaattaagtatagagatgatgaagtaaattggacccatcatcctaatatttttgtgtggtgttggggaattatgtttgaatatgtggcaacgtacttgaaatatctaagagaatttggcataattagagaatgcaaattgaacttgtgattccagtatagaatgcagacagatgctcttcaccttaaaatggggctatgtcctaataaatccgtaagttgaacatatcttaagtccaaagtgcatttagtactccaataaacccaagtcaaaagtttaagtcatccatcatgaagtccagatactcctcaatttaaatagggttatgttttgataaaaatcgtcaaaccatcattagttgggagttgtttatagttgaatatttggtttatcatcatcatcattattagtattattgagacaggatctcactgtcgctcaggctgcagtgcagtggtgcagtctcagctcactgcagcctcaacctcctggctcaaatagtccttccacctcagccttccaagtagctaagacttacaggctcataccaccatatccagctaattttttctatttttttttgtaaagatggggtcttactgtgttgcccaggctggtctcaaactcctgggctcaaatgatcctcctgccttggcctcccaaagatagtatttgattttagacttgtgattttaagtcagaaggtaggagaatttggttgaatatgaaaatattgagatgattaagataatttctcatccattatatacattttttaaatttacaagttatataagcacataggtaggtttcatcaaatgacaaaaaaatgcataaatgaaatttaaatatattgtttttaatgttacaaattagcatagtatgtcataaattaatatattacatttataaatgggatttagagtgtttaaggaaatttaattaagtttgcaaatgggactaaacattaatcaaaagcctaaaagtgattatatattttgctatagagtaataagtagatttgcatatttatagaatatagtaaagtaatacgatttttaagttgaattttttaacttaaggttttgtaatttgtaactttaatcagatactaattttaaaaccaaagtcaccataaattgtgttttctgtaaaagacaacctttccttcaggaataaggaatgcctcctacaagctccacattttaccacctcgcccaaatcgttggttaataacctcagacaattgacatgcaccccaaatttcctgaggcagtagagtttccttagtggagaagggtcttttattcctgagaaataattctacaattgtagaactaagtacagatatgctgaagtcaattggacccatcatcctaatatttttgtgtggtgcttgggaattatgtttgtatatgtgccaaagtacttgaaatatctaagagaatttggcatacagaatgcaataaattcaatgtgggattctagtttaaaatgcatacagatgctcccttacttaccatgtagttacatcctgggataaacccacggcaagtcagaaatatcataagtgaaaatgcattttatatatatatatatatatatatatatatttttttttttttttttttttttagatggagtcttgctctctcgcccaggctggagtgcagtggtgcgatctcggctcactgcaagctccgcctcctggcttcacgccattcttctgcctcagcctcccgagtagctgggaccacagacacccaccaccacacccagctaattttttgtatttttttagtaaagatggggtttcaccgtgttagccagcatggcatttaatatcttgataagcccatcataaagtcaaaaaaatcttaagtcaaaccattataagttggggattgtctgtagttgagtatttgatttcagacttctgattttaaatcagaaggtagggagaatttggttgaatatgtaaatgatactgaggtggttcagataatttataatccactgtataaatttttttaatttacaagggttatttaagtgcgtaggcaggttttgtcagacaagtgacataaaaataaaacattataaatgcaatttaaatttagtttataatgtattacaaattagcatagtatattgttataaatatattaaatttataaatggaatttagagcatttaaagaaatttaattaagtttacaaatggcactagacaatcaaaagcttacaagtgattataaattttgctataaagtaataagtagatttgtatatttatagatgtagtagagtcgtaagatttttaagttgaacttctatacttaaggttttgtaatttgtaactttaatcaaacattaattttaaaaaccagtcaccataaattgtgttttctgtgtatgaaagctacccttataagcaaataacaaaatcaataaaaaacagcacagtgacagtcagcactgattttttttttattgaggggtggagatctggagaactgcatcctcaattccaaataaggggctaacaatcatcccagaacactgcccttttctacattggggactgtcaccgcacagagggattaaggaccttgattcagctctccctgactccagggcatcaccaagcagctggctgcagcaacgctgggggcctgagctatcctgctgtcagctctcaaacccctcattttccaggacacatggcctgaagaatgcactagccccaacttggggccctggtgtggcgatgtggcaaggagcacctctctcttctccctactacatcaaaaattttaaggatgcctaaacatgtctgcttatctggagggctggggtgaatgagacgtccagaatgaaagctctcctattctgactgcgccacctgactgagaagtaactttagcttatttccttggctcatcataaaagaacgaaaagtattttcctcacattgtctacctcctcaactatggagtggacatgcatccacgccttcaactcaggtctttgagaaaaacaactttatttcccaaatttcaccttgtttttcttctgagaacttattgtgccaaactcaagagaaacataacctcagtctttcttggggttcccattcttcttccagaatcaagactctaggatgtcttctcagaaccaaggtgtttggggagggggacatctatccacacagattccttctaacgtgaccatagtcagcacccaccccccatactctaacagaccacactggggacctcaaatctgtgtgaacctttgcagccattcctttactggccccttacctatggactgcagaaagctcccacaggcctcccttccttctctctcagcatgggagaatccttctcaagtatgaggagggaagccttattctcccttttgcttttggccaagaaatcttatccattcccggtgttccttcacttacgccctgctatgacttgaatgtgccccctgaagttcatgtgttggaaacttaatccctaatacaacacttttgaaaattaaggcctagtgggaggtgtttaattcatgagggcagagcccttgtgaatggattaatgtcagttataaaagaccttgaggctgtgagttccatttcttgctctcttatactctctgcccctccatcttccaccaggggatgacacagcacaaaggtctttaccagataccagcacttgatctatcttggacttcccaacctcccatgtaaaataaatttcctttctttgtaagtcaccccatctatggtattctgttatagcaatacaaaatggactaagacactcccacaaaccccagacttcgactatgggcttagctctgggtacacaaaaactagaacagtttgcaagctggctctgactcacaccaccacagcctcactgaaatagtgggcccagagtccactctgccagaatgggaggactggggcaaagggaaatatgaaaaggaaatgggtcaatatctcaaagtgctaccacaacatattgtgaacaacttcaatagctaattttaaaaaattcttttttagaaatgaggtctcactatgttacccaggctggtctcacactcctgggctcaagcaatcctcccacctcagcctcccaaagtgctgggattacaggcatgagccaccacacgtggcctcctactgtttagatttgttcctaaaagatgcctatgtttaaaccaggccagatcactcaccctagaaattccacaaataaccaatgagctgatggctccaggcagacgggtggctgagcccagttcccatcctggcctggaggaggagacctaggaagtcacagcttaggatacactggggcgggcgggaaggtttgcttttatccatcatccaagctgtgattcagcgcataagtctccctttcattaagtttaacttgttgagtaacattaaatttatatactgcaaagcacaatagaatttcactgctgtgaacatacgcgttcacaagcatcatccaactaagtgtgagcatctgctgcctcattgggggtatttactagtcattcattatttatttatttatttatttttgagacggaaccttgctctgtcgcccaggctggagtgcagtggtgtgatctcggctcactgcaagctccgccccccgggttcacaccattctcctgtctcagcctcccgagtagctgggacgacgggcactcgccaccactcccggctatttttttttgtatttttagtagagacgaggtttcaccgtgttagccaggatggtctcgatctcctgaccttgtgatccgcccatctcggcctcccaaagtgctgggattacaggcgtgagccaccgcgcccggcctagttatttattttgcagcacctattagagtaaacagtagcagatatctaatgtctaagaaaaatttatggaaggaagatttgaacgaaaaattttctccattagcatatttttaaggagttttcctcacaacaattccatcccactcctacccctcctaccagaattctgaggatcagggcttgagaactaacatctccaaagtcccagtagctctgtggttttctacaggctcctggaggataaggaccgtgccatgtttatctcaccctccacctctcaataaagtacaaatttgtggaattggcgaggccaagaggcctcaaattcttgtatctttcatatcatccactagggggcagcaatcctctaaaaatagcccctaaaccagccacttttttagctaaaagatgactaaatttcattaaaagtagaataacaaacgcctgtaatcccagcactttggcaggccgaggcgggcggatcacgaggtccggagaccgagaccatcctggccaacacggtgaaaccccatccctactaaaaatacaaaaattagctgggtgcggtggcttgcgcctgtagtcccagctactctggaggctgaggcaggagaatcgcttgaacccggggagcggaggttgcagtgagctgagaccgcgccactgcactccagcctgggcaacagagcaagtatgtgtctcaggaaaaaaaaaaaaaaaaaaaagaataacaacaactacaatttattaaacacttactctgctcctagcactatgttatatgctaatagttcagggcttaagaacaattttattggccaggagtggtgtctcatgcctgaaatcttaccactttgggaaggtgaggcaggaggatcgcctcagctcaggaatttgagaccagcctgggcaacatagtgagacctatctctactgagaatgttttaataattcgtcaggcatggtggtgtgcactgtagtcccagctacttgggaggctgagatgggaggattacttgagcctgagtggacaggctgcagtgagctatgattgcacccctgcccttcagcctgggtgacagagcaagaccctgtctaaaaaaaaagaactcttatttatcaaaacgaacatctcaacaaaaagcaacaaccaccacataggaaggaaaccaccacctaaacgtgaattattgcaacttagtctctgaacgaacactgaagcctcgctttcttttaggtattgcttcgcaaagacttctgccttgtccctcagcctaaattcacaggatagagtcttctccatgagcaaagcaaagagccattcatctatccactcatcattcactcattcttcagacacacactgagcaattactacataccaggcactgtgctagatactgggagggattttaaaagtacacaaagccagtccattttagtccaggcctctgtatgactgaaagcctttgtcttactattaataatactgatcataactgcaaaattatagtgtagtttagaattaaatgaacctggccgggcgcagtggctcaagcctgtgatcccagcactttaggaggtggaggcgggcagatcacttgaggttaggagtttgagaccagcctgggcaacatggcaaaacccatctctactaaaaatacaaaaattagccacgtgtggtggcatgcacctgtagtcccagctacttgggaagctgagacaggagaatcacttgaaccttggatgcagaggttgcagtaagattgtgccactgcactccagcctgggcagcagagggggattccatctcaaaaaaaaaagaattaaatgcacctcaaagccaaccactagattctctcgctctgtttagaagacatttgtttgttgtaagaacccagacttaatcctgagaggttttagcggggtctaaagagagcctcgtcctaaacatccctgccaggaagaacacttccagggagcagggggcaggcagcttcctggcccaggacagtctgcatgacctaaattacttgagtcaaaaattctttgggccatatagtgttttggtggttgctgttgggttttctatttgctaacttgagcaaacatttaaaatttgagtgtttttagacaaaaacctggatttccaacttctctttaaaaagtcaaaagctccagcctccatctgcattcacgcacaggaaccttgaaaagggcctgtgttgtccatgcaccgcagtgtccacacatgtaagtttctacctgactctgtaagtgatcgagtatgagagtccgtacttgggatttcccaggtaccctgtgcggcctgcaggggatatggagaaggttgggactcaacccctcttgtggcaggccaggtctcacgaatagctaaacaggcaggcctccatgacaactgtttcagcactgactgagtgcttaggttaaacattaaaggctgcaagagccagtgtccttacacaaaggctggaatgtgacaaaagccaccaagagtcttgcctaggcctttcctgggccttgaagcatgacaagataacaaagaaattcttacattcctcgtacccacgtttaggattaaacacgttttattaggggtcagcaaagaactccccagaccgccataactcagcgggaggcaagataagggtaatcacccccagcacctggacccatctagattaaataaacttactgaggctccggaggaaggtctccaggactcagatcttagttatggattacagggaatcagtcacttgtgtcttttgatgaatccacacttacatgtagacatatagcttcatataagcactggaaaactttgtaaatatgagtcggtctggtgatattttcctggccttctgcctgtaccgggttacagaaataaactctcttctttcccagtttatctgcatctcattactgggccatgagaacaagcagcccaaccctcagttcagtctgggaacactctggctaacaacctgttaggggttgtcaccactgcctggagaggataggggtacactgggggccagccgacaggagctgaggtctcaggtagaagattcctaccttatcaatagatggaaagagattcaaacccagcatcactgactctggttccaaaatctgaaattcttttatagcgacagcacacattcaccaggtatgcagagaagagttaacagcaggtccgagatggctgctgatctttagttagaaaggcctaattgcaaagttggcccttggctggtatctgagcacttggctttccagagtgttcccaccatttctgaaactgataagagtggttcaccatgtcttgactgtacagtgtggtttatgctgagcatctgctttctttctgggagttggaattttggtacatggtagggagaaggtgcctacaagacgagaccctaataaaaaccctgggtgttgagtctctaatgagcttcccttgtggccaacatttcatatcccttgtcacaactcattgctggggaaattaagcacatattatgtgacttccacctggagaagactcttggtagcttgcccccctggttttctctggacttggccccatacacttttctttcttttttttttttggtgctgattttgccctgtatcctttcactgtaataaattataactgtaagaataactagatgctgagttatgcttcagccaatcactagattctatttagagggcatttgtttatttgaagaactcagacttacttaatcctgagagtttttacctgggtccaaagagagccttgttctaaacatccctgtctagaaagcctccgatgagactttctagcaaaccacttaaatgtagtggtcttggagaccccgaaacatcagtcaactatctccaacaactgaaagaggctttgggcttacaaagtgcaaagaataattgaggtgctaggtcatcacaggcatcactaatgagaaaataatggaaaacaggggcctaaaagttgaggccaatcaccacaaaacacctgcagagctggagaagcaaaactcaaagtggagacccctgagattggacacatgacaagggacagagtctaactgaagtggtttatttggttagtctcatacctagagaaatttaaggtgaggcagtcacccccaataccagctctacccttctttcatagtcatagtgtcccaaatttttgcaggaacccagatgcccagaataaaagattatacttcccaggtgagttgtggccatctaagttctgatcagtggcatataagcaaaaaagttcatggtagcttctgggaatcttcttctaaagagggttaatttttttttttttttttaaatggagtctcactctgttgccaggctggggtgcagtggtgcaatcttagctcactgcaacctccgcctcccgggttcaagtgattctcctgcctcagcctcccaagtagctgggattacaggcatgcaccaccacacccggctaggtttcaccatgttggccaggatggtctcggtctcttgacctcatgatctacctgcctcggcctccgaaagtgctgggattacaagcgtgagtcaccacgcccagccagatcattaatatttcttattcgtcctcttatccctcctcctaggctggaatatggatataatagctggagttccagaggctgtcttgagttgatgagaaagccttgggaatagaagcgtcatcacagagaacaagatagaactgacaccgtggagtaacataccagtaacagaccataagatttctatcactggactttgtggacatgaaaaatctccatctgttcttggggctttactgttacttccagctaaatttaatcctccttaatgcaaaagaaattccggatggggaagtgtttataaagtcatgtatccagaaccatagactcaccaaatcttagatctgaagagtcatcaggaagctttttgtttcagccttttcattttacagttggaaaaactgaggcctagtcacctctgtggtttgtcagggttacatggctagttaggagcaaaactgaggccagatcccaggttttggggctacaggctcatggttctcattttcctgctatgagaactgcctcaggtaggccagggcaggggtaaagtccaaaagggggtttctgtctagaggactcaaagaaaaagcagtgtcggattgccgtagctcacgcctgtaaccccagcactttgggaggtcgaggcaggtggatcgcttgagcccaggagtttgagaccagcctgggcaacatggtaaaactccatttcttcaaaaaatacaaaaattagctggatgtgatggtatgtgcctgtcgtccaagctacttgggagcctgaggtgggaggatagcttaagccctggaggttgaggctgcagtgagctacgatggtaccactgcactctagcctgggtgacagagtgagactctatctcaaaaaaaaaaaaaagaaaagaaaagaaaagaaaaaaaagaaaacatgctgatagactgtacgtgatgaaatttcagagatctcctgggaggccatcccgcttccagtttcgatgggcagagactcaacagtggaaggcaggtatgacctgggacttctcaggccccagcttccctcctcttcaccttcctctcacccatcagacttcacacctccctcttcccgtggtgttcaaacctaagtctatacagagtgcctcgaacccatatggtgcttagtggtggaacccgggctagatttcaccccacctgtgccttcttggccagtccctctatgaagtacacagaccgacaaccttttacagaggactgggcttgacaaagagctcgcttggatccatcttgcttccctgtgcgcacccggccccactcacaccgagggagtttcggccctgctggaaacaccgtggcagatgctttggtggcctgcccatttctttcactttgtcattcacggatgtcaaagcaccagcacctgcagttctttgtttctgggcttcctctggtgcaaaagctgctttttctgcctatgttggaggtgcgggggatttaggagacctaaggaatgggctccagtgagatgaagggaacgggtgtgtaaagcctcagcccctcgcctggtgggggctgagtctgaggaatgtgccctgcattgttcccgcatgattaggctccagctgcccccagtggtaaggcccctctcctccctctcctccctccccagtctaggggtgcttcacctcccaaataaagagggttcactcatccttatctcagggtctgcttctgggggagctgaccagaagcaaaccttcctcagcactcagattttacttactccaaaattagggaatattaagtttgaacagataccctgtgctcaaaagcatgcgcacagacatatatatagaaatttcgggccgggtgcagtggctcacgcctgtaatcccagcactttgggaggccaaggcggatcacttgaggccaggagtttgagatcagcctggccaacctagggagaccccatctctacaaaaataattatttagctgagtgtgatggtggacacctgtagtcccagctactcgggagactgaggtgggatgatcacttgagcctagtagttcaagactacagtgagccatgatggcaccaccgtactccagcctgggtgacagagtgagaccgtatctcaattaaaaaaggaaatttccaacttttctctgagcccactacccaaagacaatcatatgcctcagccactcagctgagctttactgcccttccaagaatagcctagaaatccagtaaggacaatggaaactagaaaaatgaagagacactgatactggatctaattcatatttttaaccccactcaccacctgcaatcacacccacccacagccttcagtaagtgctcagtaaatatctgttagtcagcaaagctactgggagcacacactctgcccctgcgccatacaccctgcccccaacccctgctctattatggtgatttccccactcctagtctctctgcacagaatggtgaagaaactgcatttggttttttcaaactattcttcaggccgggcacagtggctcatgcctgtaatctcagcactttgggaggctgaggtgggcagatcacaaagtcaggagttccagaccagcttggccaacatggtgaaacctcgtctctactaaaaattaaaaaaattagccaggcatggtggtgcgcgtctgtattcccagctactcaggaggctgaggcaggagaaacgcttgaacctgggaggcggaggttgcggtgagccgagatcacgccattgccctccagcctgggcgacagagcaagactctgtctcaaaagaaaaaaagaaaaaaaaaatacaaaaaaaaaacctattcttctgcaccctcaggagaatgggccaggaacatgctcttgaaacaggctgcttgctcagaaatacatttccatattagcaggcgcagctgtcactcctgctggaggcctgttggcttcttgagaactgctagtctcaccatttgccacatgcccaacaggaaaatttaattcacagaaactcagaatgccagattcctcctccctcccaactcagggatcccctcaagagcctgcctgacagctgttatctccttcatgaacacctcaagtgacagggaactcaccgctgtatgatgtagcctatcctattgttggaaggctctagttactaataattcttattagtaaacatcatctattaaacatttgctatgtgccagcctctattaaaagtaatttaactagccaggtgtggtggtgtgcacttgtggtcccaactacttggaaggctgaggcaagaggattccttgagcccaggagttcaagactgcagtgagctatgatcgcgccactctacttcagcctgggccacagaacaagacctcaactcctttaaaaataaaaattaaatgaaatgtgcttaacctgtgtcaactcatttaatcatgacaacaatcctatgaaatagatgctattgttattactccacctgacctgacaggcaaggaaacttacagcacagagaagtaaataattagctgaagatcacagagctagctagcaagtggcagaatgcaatttcaaacaaaaagtggcctttgagagctttcctctgttgccttttttctacttggggcagaaatcttccatcctataagtgagcctttttaggtccagatccttgtgaaattgtgatgagtgccaaggaccctttccatgctactgtgcatatggtcacaaaactctgcatattatttcagggagtcaatctaccccagtccttggaccccaggttaagaaccacagctaacacaaaataacgttgctcttgtatctatttggaaattctcttatgaacttttttatttctaacagactttctccaagcttaattttccctatttttttatttttttcagacagagtcttcctctgttgcccaggctggcatgcaatggtacaatcttggctcactgcaacctctgccttctgggttcaagtgattttcctgccttagcctcccaagtagctgggattacagatatgcaccaccacgtccagctaatttttgtatttttagtagagatggggtttcaccgtgttgtccaggctggtctcgaactcctgacctcaagagatccacccatctcagccttccaaagtgctgggattacaggcatgaaccgtcgcgcccggccaattttcccagttctagatgaaagaatgttcaaccacaccaatactcaaagatagacaaattcaaataataaggttaaggtgttattttgtacctttataacaacaaacaactataaagaaaatactcaaaaatcaagtgctggccaggtgcagtggcagacacctatcatcccagcactttgcaaggccaaggcaggtggatctctgagctcaggagttcaggaccagcctgggcaacaagatgaaaccccatttctacaaaaaattagccaggcacggtagtgcgcctgtagtcgcagctactcaggagactgaggtgggaggatgccttaagcctggaaggccaaagctgcagtgagctatgatcacaccactgcactccagcccaggcaacagagcaagaccctgtctccaaaaaaagagtgctgggagggttgtactcctgttgctgctgctatggtacctgtatacactaccattagaaatttggcaacacacaggaaagactgatgaaaacacccataagcttttgacccggtaattctactcctcaaatttattccaaaaaaataatttagatggaaataaaagtcacatgtagaaagatatttatagcaaacttttctctaagagccagaaaaaaaaaaaaacaatgtccaaaaaaacaactgggaaattataagcaaatatggtcattagcttaatggaacatataaaataatgaaaagcattaaaataacatttaggaaaaaatgtggaaggtggaaatcaacatgatgatgattgtcaattgtggggtgatagggtggggatgcccagggaactttcaattcgctttttattgcctcactttaaaaagtgagagaccaaataatcagaacaaaagcagctcagaggaaagagagagaaactataaaggatcagaggatccctcaaaccaaaatgaaacaaaacactataaataatatcctctatgaaatatgaaaagatatgcatccacgaaagagaaacagaagaggatggggtgtaatcagaaaacatgaaagaaggcctggcatggtggctcacacttgtaatctcagcactttgggaggctgagtggggcggatcccgtgaggtcaggagttcgagatcagcctggccaacatggtgaaatcccatctctacaaaaaatacaaaaattagctgggtgtggtggtgcacacctgtaatcccagctactgggaggctgaggcaggagaattccttgaacccgggaggcagaggttgcagtgagctgagatcgtgccactgaactccagcctgggaaacagagcaagactcccatctcaaaaaaaaaaaaaaaaaaaaaagatagagttattggagatggagttataacaactgaagtagtaaattcaacagaaactctggaagataaagtaggctaactatccagaaaattgaacaaaaataaatagagagatagaaaatgggagaaaagatgaccaatccagaagacccaatatctacctaataggagtccgctaagagacaacagagacaatctccaggacagagagtgtaactggccaagccaaaggcatgtgcccaacccatggctaggtaggaaagggaggatctggcccatttgggtctagaaggaaagggcactgtctccccccacaacccaggagtatggtcccccaaaaggaaaagtaatagatgctactagaaaatgagggttagatgatatacagccaagagctaccactgtccactgcacaggaacctctgttgactcctagtaaccacaccttcttctctaaatactcatagagcactttcaataggatttttgcatcctgtcaaatgcaaaacctccctctctaggcctgttgtgcattatcatagctgagatgtgtacatcctacatgccaattgtttctcatgagttatctcattaaagccttacaacaaagcaaacaagaaaatcatcttaataaccccaattataaatcaggacactactgcccagagcggttaagaagcatgcccagcttcacccagctaataaagagattcaagccaggatttggacctagtaccctgaccatggagctcgcactcttatgccacaggactttatgtacctctccctggaggcttctcggtgcctccagtgaccccgatgcctcactgccttctggaccccaaagaggatctaaagtaggtcgtcaaacagccgtgagagcctccattgagccacacaccccgagttttctgcatgcagcccagcacctagctcagagagtccctggcatgcttggtcaccctaggaggtccattagccctcccaagtcaccagggtgctgggagccgccactagatctcagccctccttcacgtcacacacctcactcaggggctgtccacaggcttgctctggctgtagcatgggaacccctgctccttcttatctggtgcaaggagcccaggggatgcctttaaggaaggtcagccctgtcggtgagacatgttgtgcaaaaggcaggttgactggagaaaagtcatacacgtttatttcacatttatacacaggatccttcagaatgaaaacccaaagataacgcggaaattggccatactgatgcttaagattaacgaagtatgaacagctatgtacaaatgcgactggacaaaaaaagggtatgatctaatgctgatagactgagctgggagattcagtgaggcctgtgtagattcttggcctctctgcacagcatccctttcttctgtgtgtggggcaggaccctctcgggaatgggggaattatgacctacagtcaaacaaggtaagtcggatcatttctttatggccagtttttacacagaaaggcagagggaaaataagagtaatatttttaggatttatggctggctttggggaaaagaggttctggtttctatggggaagagggattctagtttctaaggctagactaggggagaacgcgcctgagagaaaggagggcaggtatgcagagaaaaacttttaacttctgaggctttcattttagagtactcttttctgagtcccaacagtgggaagccagaggaagcagaactgtacttgtgagagcccccagacagctggctcttcccccacgcagcagcagtcaggccccagagctcctcttgcacgacagcacaagggcaaagcctgtctgggctggtggaagcttccgtgggtctggctgtattggggggaagacctgtctgggagcctcttcaactatttatctgttctgccttcctcccccttgctcctgtcctttgaacgctaacctggacacagaagctctcagcatttaggaggccttaattgcagctccatttaatgtaagatctcttgaagtgggtcccaatcttaggccacaagttcaggtgtacagaaaacaaaccatttctctttgtctttttttttttttgagatggagtcttgctctgtcacccaggctggagtgcagtggcgcaatctccacctcccgggttcaagcaattcttgtgcctcagcctcccgtgtagctgggattacaggtgtgcaccactacgcctggataatttttgtatttttagtggagacaaggtttcaccatgttgccaggcttgtctccaactcctgacctcaggtgatccacccgcctcagcctcccaaagtgttgggattacaggtgtgagccaccacacccagccaacaaacaatttttctgtcacagagtttaattctatttgattcctatcctgccaatgtggcagaaacataatctctgttgatttaaaatttacccacatcctgaacctgggatcttgtcaaagtcccactgagctctgggagatggggtctttattgtcttttgtcacacaggtgtctagaagatgccacctattgtcacttactttgtgtcttacacaactgcagaccactattcaaaggctatatagtttgctctcactgctgtaacaaattatcacaaatataatggcttaacacaacacaaacttatttctcacagtttctgtagaagtgcaacatgggtcttaccaggtggtggctgtgctgggcttatagctggagactctgggaaagaatcctcttccaagctcgttcaggttgctggcccagttcagttctttgtgggtaaacttgctaggtggcagctagggtcaccctcagctccttaggttccttctttggtccttgcacatcatccaggaggcatcagatctttctcacgcttggaagatcatggactcggccttctgcggcatctgactcttccgccttccttttctgcttgattacatcgggcccacctggatgtgctgggtcgcctccctattttaaggtcagcttattagtaaccttaattccacctgcaaagccccttcccagcagaacctaaatttgtgtttgattgaccaaacagggagaagggagagtatctttagagttttgcctacagcaaaggccactgtgtgagcacatccctgaaggtgtgcagggcagctgccatcactcacctctcagcccattcactagacagatgccctgtcaaggtcatggtccttttaaggctgaaggtttgctgcccctactgcggctgtcttgggaaagaactggttctgttctgaaccatgctgggatagaacctctagaaggcaaggtcccgtctacctcaacacacacacaagccatttcctctctggggtctcccagggctctttctaggttgcaggaaacaggacgatctgccccctgtttccgacctgtacccccacctctgcactgtcattgctttccttcttccccacaccaccaaggaaatcaccttctcatcaaacctcccatatgccaaatattttggctagatctggagtcctgtacactctggagtggctttgggctttttgaatcccaggtccagtcctgctttcctgtctgtcacattccacagctgaggcaatgagccaggaagtcacctgcttggaagttggagggggacagggagttggagaatggcaaagtggggttaatactgcaaacctgttttcctgccactctcctgacatgctctgttctttaaaatgcccttggcacctggtccatcacaggccgcatccttagcaactaagttggaagaaatggggctctttggccagcaatgtcttcccgccatgggctatacctgcaggtgccgggtgaggaggactgcgggcagctctgaagcctccacttttccttatgggttttttgttcactctccagggcctaattcagatgtcacctcccctgtgcggcttctccaacccttcagatagatgtgatcactccctcccctgagccccagaacactttgtccaatttcctgcaccctctgagagcgtggcacaggccccctccactgtgtaacaactcacagcccctccctgcatcagaagcccacccccttcctccggggtgcctcttctttctagtcatagtgtcttccctcagtagtctatccctctggggactctgaatatcttcccttccccctcagcaatccctagcacacttgcagctgtgagggctgcacctgaggacagagcaggggcgggaaccccagtcttagaggctgttgtcatcaaagttcaaatggaagatcctctgagaaggatctgcagggagaccaattgccacccctagggaaggccgggcttctgtggtatctcaagccctgggacctagaggcagcttcccgtagggagcagccagaaggccctttccctaccccctcaccacccagagaggcctccctgggatgccctcccctgaaccctagagcttcatggggattgctatgtttgcactgtgatgtcatttcaaggtcatggtgatatgcgctacagctgagcaagattgttcccagcatcagattggaagttgaaagaaaggctaagtcacaagaacccaagagctgggtgaatgcacagctgtgccctaggcccaccagcaaggaccacatttattaggctcagcctcccacacaaacggtgccagaaagtctaagagaagaaggggaacagaggaagggagggaaagtcctttaaatcaacatggtttcattgagcttctgcaccatgcaggggcctgtgggattgagaaggagaatataatcctagtccttgctctcaggaagcttatcatctgtgtagagcccaagagtgagcagctgggtgaacaagaagtggtgcaagggggaagagttaccacagatggtataacagtttgctcaggctgcctgaaacaacagaaagttactgtctttacagttctggagaactggcctaggaaatcaagatggcggcagagctggtttcttctgagggttgtgaggggtctgctccaggcctccctcggcttgtggatgtccatcttctccctgtgtctctttacatcatcttccctctatgcatgtctgtcttttcgcccacatatcccccttttaaggacaccagtcatatcggatgagggcccatcctaatgacctcattttaacttttttacctctataatgaccctgttttcaaatataatcacactctgacatactaggggttagggcttgacatggtttggctgtgtcctcacccaaatttcatcttgagttgtagctcctgtaattcccacatgtcatgggaggaacccagtgggaggttgttgaatcagggtgggtgagtccttcctgtgctgttctcgtgatagtgaataaatctcatgagatccgatggttttataaatgggagttcccctgcacacattttctgtcttgcctgctgccatgtaagacgttcctttcaccttccaccaagattgtgaggcctccccagccacgtggaactgtgagtccattaaacctctttttctttataagtaacctagtctggggtatgtctttatcagcagtgtgaaaatgaactaatacagggctccaacataccttttttagagggacacaattcaacccacaacagtggctttggggagaaaggaagacttgaaagaggagaatttcctcattcatctatctatctatctatttatctatctatctatctatttatttatttttgagatggagtcttactcttgtcgccagactggagtgcattggtgccatctcgacttactgcaacctccacctcctgggttcaagtgattctcctacctcagcctcccaagtagctgggattacaggcacccaccaccaggccggctaatttttgtatttttagtagagacagggttttaccatgttggccaggctggccttgaactcctgacctcaggtgatccgcccacctctgcctcccaaagtgctgggattacaggtatgagccaccacacccggccagaatttcctcatctaaaagggcaggttcccaggcagaggtaaacactgggaggttttatactttgtgattactgaataattcctcaaggatgtttttctagatttgaggaacatcttcagggacagaagatgccacattgggcagggcttcttcatgcaggccccaaccacaggggcaacagaatcctggtccctgggagactgtgcccagccatgagcatcagctgaagccacaacctcaaacattcctaccaaaagggaagctagctgctgggatccacatgagggcaaagtggagatgaattcagagggcaagaagcagccagtagggcaagagggagagaggacctttcttcctgacccaccccacacatacaatggactaaatatttgtgtccccttaaaattcatgagttgaaatcctaaaccccaaagtgatggcataaggaggtgggaattttgaagggtaattcagtcatgagggcagagccgtcatgattaggatttagtgaccacagagagctagctcacccactctaccatgataggacacagcaagaaggttccatctatgaaccagaaactgggcctggccagacactgaatcttcctgcaccttgatcttggacttcccagactccagaactgtgagaaataaatttctgttgtttctaagacaccagtgtatggtatttttgttttagcagcccagacagactaagacaacacacaaacaggaaaaatcagatacctcctgctgcctagctagatggcttaagagtccaggacatagacagaggtaggggcaagaaggctgctgggcctgggctttacgttcaagaaaggacttttagacttttgatgttatttccaactgatgtttgttatgggccaagttgtgtccctccaaaattcatatgttgaagtcctaacccccagcaactcagaatctgactgaatttggaggatagggttaagacgtcagtcagttaaaaagaggttgtgagggtaggtcttaatccaataagggtgtctctataagaagaggaaaattggcacagacacacacagagagaagaccacatgaacacacaaggagaagatggcatctgcaagccaaggagacaggcctcagaaaccaaccctgccaacaccttgatccctgacttccagcctccaggactgcaagacaataaatgtctgtttaagccactggtcctgcagtagtttgttatggcagccctagcaaactagtataaagttctatccatatgcccctgggatgtgtttctaagcattcatttttaaaatgtaacatttcttaaaaatatactgtaacattttaacttgttttggcatttctgctttttttttttttcatgggacagtcttgctcgctcgcccaggctggagtgcggtggcacaatcttggctctctgcctccggggttcaagcgattctcctgcctaagcctcctgagtagtggggattacaggcgtgcaccaccaggcccggctaatttatatatatatatatatttttagcagagacaggtttttaccatgttggccaggctggtcttgaactcctgccctcaagtgatccacctgccttggcctcccaaagtactgggattacaggcatgagccactgggcctggctggcatttctgcatttttaataccttgggaacaaccaccacccctcaaaatgacagtggctcatctttgtcaattataccttaataaagctggaggaaaattaataaaatggactacaaaagaagaagaagaagaagaagaagaaaagaaaagaaagtagcccaagttctctgtacctcccagatgccccagtgaagggcctcagctgtgatgagaaaacccagcagcccaattcctggcaactctcctgggatctggaatgatggtgtgcctgggcacagccttcctatctggcccgagagccagctggcaccattggagtgaggagagggctctgagctttcccagtaggctggcaacctcccaggctccctcccccagcccctataaaaccatctggaaaatgaaaataataccttctgcttcctaccaagctccagggaccctgtgaggaacagggagatactatccccataccccacacattcctggaggaggttgccctggaataagctattgccccgcctctttcaccccaagtggcagaaacgagggccactcagtgctctgtccagctgctcttgcttcccctcaggagccacttctgcttccatcccacctgattggagtgggcttcccacaggcccccgctccgcagctcctcagtgctctcctcctcctccctgctcccccgagcccagcccagtctgaggtccatccccctgtgaggggagctgagcagtgctgcaaactcagtgctcctgagtaccctggggatttgctgaactgcacattctcattctgtaaaccggagctgagcctctgcacgtctaacctgctccctggcaatgctgctgttactgagcagagtggaaaagtgctagacaatacattggggggaaatttcagtctcaaatgcattggagcagaaaccagaactccctgtcaagctgctctgtgggtttttgaagcgaagtgtgttgctcttcactggctgctctgagctgctcagagcgggggacagaagctgggtctacccgagcatctgtccagccacatcccctcactcttcagggtggcactgggcacacagccccagagtcaaggtggcatttagctgggccttcagtccggcaccagcaagtgctctttaacttggggtccttggagtccataggtgggcacagctcaatttggggatgtacctgagaaaaatgcttcccagatgggcttctctgccccatccctctctccaccgggcctggccagaccccagggtgaattgttctaattccttgcactttttcctggcagggtctccaggctcatgaaatctgcctcttgccaaaggcagaggatccactggcagcagggagcactggctgcagtcaggcaggtgcaatcattttttaatgacatcttttcccccttatcaaaattgtgcaattcactttagaatatttagaaaatattggaaaatgtaaagaaggaagtaatcctgcaatcctacaactcagaaatgatgtttcagcactttggaaaatatccttccaatctttcacatgcacaggtgtggtctgtatacggcactggagatccccagcaccaaaaagttaacactgtaggaaaactatttatccatgtcagttattctttgaaagtatgatgtaggggaaaaaaaaggggggatcagactgttactgtgttgtaaccgagcgagttatacagaaacgccacactctgagacgaattgaggagtcctttattagccagcgaccgagagacggctagtgctcaaaattctctcggccctgaagaaggggctagattttgttttatactttggtttagagaggggagggggagcctagctgtagcagtcttacagaagtaaaacaggcaaaagaagttaaaaagacaaatggttacaggaaagcaaacagttccaggtgcaggggctttaaatccatcacaaggtgatagacgctgggctttgggtgctatcaaccagacaaaaacacaggggcttagggtaatatcaactggacaaattcctgggaactgcggacatagcttgccacagcatgttatcagttaattgcattctttgatgtgctgggagtcagcttgcacaagttaattccttgaggaagggggtgggtaaggagcccttgatgtcttgcaaatgaaggagccaaatggagtccgttcaggtttctcagctaagagagagtcaatcaggttaatacaagttagggtatcacaagtgtgtctatttagaaaaggaagacttaagaaactccattttgatctgtaccctgaacaatggttttgccttgagatgctgttaatctgtaacttttctccagccttgtgctcacagaaacatgtgttgtatggaattaaggtttaagggatctagggctgtgcaggatgtgccttgttaacaatatgtttacaggcagtatgcttggtaaaagtcatcgccattctccattctcgattaaccaggggcacgatgcactgcggaaagccgcagggacctctgcccaggaaaaccgggtattgtccaaagttcctccccactgagacagcctgagatatgtcctcatgggatgggaaagacctgaccgtcccccagcccgacacccgtgaagggtctgtgctgaggagaattagtaaaagaggaaggcctctgtctcataccgaacggaatgtctcggtataaaacccgattgtagaaaaccacactggcaggaggcgagatatgctggcggcaattattctttattctgttattctttactacactgagatgtttgggtggagagaagcataaatctggcctacgtgcacatccaggcatagtaccttcccttgaacttatttgtgacacacattcctttgctcacgttttcttgctgaccttctccccactatcaccctgttctcctgccgcttcctcttgctgagatagtgaaaatagtaatcaataaatactgagggaactcagagaccggtgctggtgcaggtcctccgtatgctgagcgccagtctgctgggcccactgttctttctctatactttgtctctgtgtcttacttcttttctcagtctctcgtcccacctgacgagaaatacccacaggtgtggaggggcaaaccaccccttcatgtgatgtttaggccgggtgcaatagcccgcgcctgtaatcccagcactttgggaggccgaggtaggaggttcacttgaacccaggagttcaagaccagcctgggcaacataatgagacctcatttctaaaaaataaataaataaataaaaattgttttaattagctgggcatggtggtgcacacctgtagtcacaggtgctcgagaggctgaggtgggagaatcagttcagcccaggagttcaaggctgcagtgagctgtgatcgcaccactgcactccagcctggacaataaagtgagaccgtgtctcaaaaatagtatgatttttttaatagctgcataatagtctcccctatggatatttttattgtttacttaatgcttgccctatttggggccattgaagttgtttaattctttttccaatataaataattttattctggccatgtttttattgaaatctctaaccctataatctctttttttccttagaataggtttccaggattgggatattggaacaaaaggttaaatattcttaaagttcctgatagatgttgttgaattgtttccagaaagcttcaacaaattcatcccctctagccatagtgcctgtttcaagaaatgatcagcattgtccattatcttcttttattttttcccaatttggtaggtaaaactagtatcatttctagtctgcattctgcttgactctcgtgtggctgaacatttttttctgagtggcatagccattcatgtttcttctgtgacgggtctggacacatcctcagtgctctcattttcaggagagcaaggatggggaacgaggggatatgcattgtattagtttgttttcatgctgctgataaagacataccagagactgggaagaaaaagaggtttaattggacttacagttccacatggctggggaggcctcagaatcatggcaggaggtgaaaggcacttcttacatggcagcagcaagagaaaaagagggagaagcaaaagcagaaaaccctgataaacccatcagctctcatgagacttattcactatcacaagaatagcacgagaaagaccggcccccatgattcaattacctcaccctggccccctcccacaacatgtgggaattctgggagatacaattcaagttgagatttgggtggggacacagccaaactatatcatgcatcaccacctgatggcacccacccataacctctgccatgctgtgtgcccccccacccatgcctgtgggcgaggctccccaggcctggtgcctttgctgccagactctgggtacttccattcacactcccatctctgggtgtcctcaagataacccgatgttcccaggatccttccctcaattaacaatgacctgccctagccccatttcttcagcaccgtctccatgctaagttacaaggagtgggcccaaacaaacaactgaaagctaaacgtcttcacctaaccaaaatgttggccgtctgtattagtctgttttcatactgctataaagactacctgagactgggtaatttataaagaaaggaggtttaattgactcacagttctgcatggctggggaggcctcaggaaacttacaatcatggcagaaggtgaaggggaagcaaggcacatcttacaaggcagcagaagagaaagagcatgtagaagaaactgccactcttaaatcatcagatcacggctgggtgcagtggctcacacctataatcccagcactttgggaggttgaggcaggcagatcacttgaggtcaggagttcgagaccagcctggccaacatggtaaaaccccatcaccactaaaaatacaaaaattagctcaccatggtggcacatgcctgtaaccccagctacttgggaggctgaggcaagagaatcgcttgacatctgggaggtggaggttgcagtgagccaagatcatgccactgtactccagcctgggcaacagagtgggactccatctcaaaaaaaaaaaaaaaaaaggtcagatcttgtgagaactccctcaccatcacaagaacagcattggggaaaccgccttcatgatccaatcactcccaccaggtccctcccacaacatggggggattacaatttgagatgagatttgggtggggacacagggccaaaccatatcaccacccacaaaagctttttgacaaataactctgactaggaattgtaagaaatgtttttaaatgagtaaggtggaagcaaacattattcccattttatagacaagaaatgtgtgtctctggatctgtgacactccataaaccagggaaaaggcagagacaatgactgattttctgccgcccaatccagttgcccaaccctcctggctcaatgccaggacttccctgtctttgattagggaaagtggagccacccactccctacatgcaactgttacacacccagtgtcccagaaatgacattcaacttcactatagcgactgcttttactgacatcatttttagcagacgttttactataaaaatgggtggggagaaataaagcagataaactgctgccaaggaccatcactgctagggtgaaactgggggcacacggtatagctcaaatgcaccccaggtccagcccaagccttgctcaaaacccacccaggaaccagacctatcatccaaggttgtctctccaatgaccttagcaggttcagaataaccctctaatattcctcatttactgtagttgcttattatgaacccaccaactattaattcaatcttttttgaattctcagttttcagtatatttctcttcaggctgtggtacatatcacaacatatagtaattatttgctattttctgcttccctgtctagactttgagtaagttgagggtagaatttgttctatttcataatcttagaatttgacaaatagcaggtattcttaaccataattttgttgaaggaaggaatcaatgaataaaaatttcctgagtttactgtttactgcaaaaagactgtatgctgttttacgttttcttcttttaaggtctaacatcaatatgttgatgtttggtaaatataatttcaatcccagttgcatctctgagtccaggcaagagtactacaaaaagtataaatagaggtcaagtgcagttgccctctgcaagcaagaccacttagaactcttcaatggctctttgacaaaccttcagtgggatttctgtcaaagctgacaatggataaaattatagaaaggagggaaagccttgataaggagtccttaatgagttcgtcactaagttaattcaacattgaaagggatagaagatgttaattccacacacacgtgaaagaaatcaacaatcaggcctcatctgagagaaccatgatggggaaggctggggctgatggatgaggggtgtgaggcagggcagaaagcctccacgttgctgcagcaatgcaaaaataggcaccttgccgtaggcctctctggcactccatcttgtctctcttccctggagaaaaggcaagctgtattcaatcatcttttcaatgctaaaaccaggctttcctgtcggagttggggccagagatgtttccatcccctcttgcaaaaagggtattcttaagaggccttaagtcttcagcattgatagtttctgggaacaaaatagaaatcaaaatctcaccttgtgttcccttcctcttcctggacagagaatgggacaggcccaggccatccagatcactatgaaccttatcagaaacttcagtccattttctccgttcccttccctgggacttgcatgctataatctccatacccctccttccccactctccaggcttagtgggtgaggcagagagtgagagccaggcttacctgccttttctcctcagtgggaagaagctcagtaactgagctcagacgctagtggcatacctaccaagaggatgacataaatgcctcctgtggccctgagataggcagagctctgctggcagcccaaccatatgttcactcgttcattaacaaacatccacagaggcaggctgctctggcctggagggggatgtcctacactagacgactcaggttcatagagccaggcctcattccacccccactggctcaagtgactttctggtgaccagaaactggagagctcttttttttttttttagacggggtcttgctctctcgcccaggctggagtatactgacacaatctcggctcactgcaacctctgactcccaggttcaactgattctcctgcctcagcctcccaagtagctgggattacaggcgagtgccaccaggcccatctaattttttgtgttttttagtagagacggggtttcgccatgttggccaggctggtctcaaactcccgatctcaggcgatccgcccgcctcagcctcccaaagtgctgggattacaggtgtgagccaccatgcctggcccagagctcttaactacaatgactatatgcagaagaacaaactaacacggaagatggctaggaactgcgtaagccaagactctgcagtaagacacacttgagttctggtcctcactctgccgtttactcacagtccaactgcagatgggacctcacctctctgagcctcagtttcctcatttgtaaaataggcaaatattggcacctacctcatagaattagtgcgaggcttaactgaggtgatctaggcaaagcacttagcttggtacctagcacatattaagtgctcaataataggtgatggtgatgatgtaagttggacacaagagaaaaggacacatactaactgataatcacacagagccactgactggatttggtatctttctctgacattcagcttttcttaccatctgtcagcatgccacactccttcagccttgaattatatgctgccttgtggttttgctcttataaaacaaatagaatgtactagtcttcctgtggctactgaaaaaaaaaaaaaaaaagaccacaaaccagtgatttacaacacagaaagttactctctcacagttctgaagaccagaagtctgaaagtactatgttgtcagggctgtgctccctccaaaggatctagggggtgatctattacttacttcttccagctttgggtggctgtcagcatgccttggcttgtagctgcaccactccaatttctacctagtcttcttatcatctcatctgtgtctgttttctcctcagtgtgtctcttataaaaacacttgtcatgccagacatggtggctcatgcctgtaatcccagcatgttgggaggccgaggtgggcagatcacttgaggtcaggggtttgagaccagcctggtcaacatggtgaaaccccatctctactaaaaatacaaaaattagccaggcgtggtggcgggctcctgtaattgcagctactcaggaggtggaggcaagagaattgcttgaaactgggaggcggaggttgcaatgaactgagatcacaccattgcactccagcctgggtgacagagcaagactccacctcaaaaaaaaaataataataataacttggctaatccagggtgatctcctcaaatcaagatccctaatttcattacgtctgcaaagttaacatttacagttctggaaattaggatgtagacgtctttttgggaaccatctatcttagactgttcaggcaactataacaaaataccagatgctgggtagcttacaaacaacaaacatttatttctcacagttctggaggcttggaagtccaagatcaaggcactggaagctgtagtgtctggtgaggtcttttaactatgtcctcattgcggaaggggccagggatctctcttccttttataaggcttctagtctcttttttttctttctttcttttgagacagggtctcactctgtcccccaggatggagtacagtggcacaattttggctagctgaaacctctgcctcccaggctcaagtgatcctcccacctcagcctcctgagtagctgggactacaggcgcatgccaccatgtccagctaatttttttttttttttttttttgtagagatggggttttgccatgttgacaaggctgccaggctggtctcgcactcctggcctcaagcaatccacccacctcggcctcccaaagtgttggcattataggtatgagccactgcacccagcttcattcatgaaggttctatcttcatgaactaatcatctcccaaataccatcaccctgggggctgggatttcagcatataaattttggggagatataaatattcagtccattacaccaacatttggtccactacttggagtacctaagaacatggactttagaagtagactgacctggattccaataccagccccaccatcactcactagttggatgaccttgattcagttatttaatatctttgaacctcagcttctggaaaagggccaataatgccaataatgctatgtcccggggttgtttgaaagaattaaataagctaatatgttaaaagtactggataattggtagctctcattactagtggtaggtttaccccactagtctacaagctcttaagagctggagttatctctgcttccttcacaagtctagcacaagtctgcaaacagtctatccttagtgaaggtggggtgacaaactggctgaaccagtggcctagacagccaatatcaccaattatgtaagattccacagggatctaaaggagcgaattagaggcacccaatagtgaccccaatctaagcagtgcagggatcagctgggtgggtttgtcagcagagaacagggccaccagggcaggcacatagaactaactgcactcactgcactgttgttaactattctttgaatccctccacatgacgccattcctacagatggaaggtcagctacactggagaagttccagaaattcataaatagattatgatcccaaatcccagagaggaggacttttccagatggcaactgggaatttaccttaatgatttccccatcccagaagggaaagctgttctggtatattacaaacattacagcacatctgaataacccagagagcttgtttaaatgcacatttttgggcctctaccaggctggttaaacaaagcttcaacagagtggggataggaaccaaccattttaaataaccccctttggtaattctggttcaaccatagcaatcaaattatagtccaacctaggtaggggcttgctacctaggagtcaatatgtaatactggaaagagtaagagtttggaaactaaacagaaatagggtccaatcctgggtcgtccacataatagctgtgggaccttgggcaagttacttcatttttttggatctcaacttcctcttctataaagggggggctatacctgtcagggtagtggtgttaattcaatgataattatgtaaagtgcctgctcatagtagattgaagcagagactgctactattcaccaatccatttcttcttcttgttcatacacaactagactatatttcccagcaccctttgcagccaggcacggccacactagttctcaccaaggggatatggttctaagttatagtacctattcttggcaaaggcttaaggaacagatatgcctcctccaggttttcttttgtcttacatcacttggatgcaggtgacaggttctagggaactggggatctacaacatggaaggagcctgtatgcctgagttactaggtaggggaaagctatccatcaactagaatgcctgccttggactcttctgcaaacgagaaataagctcatataccatattaggttataatatagttgctttaaagaaatacccatggccaggcgtgggggcttacacctcccagcactttgggaggctgaggcaggaggatcacttgaggccaggagtttgagaccagcctggccaacatggtgaaaccccatctctactgaaaatacaaaaaattagccaggtgtgggggcaggcgcctgtaatcccagctattcgggtggctgaggcacaagaatcgcttgaacccaggaggcagaggttgcgtgagccgagtttcaggctgcactccagcctgggggacagagtgagactctgtctcaaaaaaagaaaagaaatacctgcattgctataaagaaatacctgagactttaatttataaagaaaggagttttggaggctttttcttttttttgagacagaatttcgctcttgttgtccaggctggagtgcaatggcgcgatcttgactcactgcaacctccgcctcccaggttccagtgattctcctgcctcagcctcctgagtagctgggactataggcatgtgccaccacacctggctaattttatatttttagtagagatggggtttctccatgttggtcaggctggtcccgaactcccaacctcaggtgatccgcccactttggcctcccaaagtactgggattacaggcatgagccaacgcacccagccaagaaaggagtttgtttgtttgtctgtttttccaagaaaggagttttaactggctcatgattctacaggctgcacaagcaaggtgctggcatctgctcagtttctggggtggcctaagggagcttttacttaaagccagagcaagcatctcacatggcagagtagaatcaagagtgagagttggtgtggtggtgaggaatctcaggatgacctccctgagattgctgtcccctagttattcacaaaaactcactgactatcacaaggtcagcatcaaggcgtgaggcatccacccccatgacccaaacgccaggccccacctccaacactgaggattacatctcgacatgagatttggaggggccatctaaactatatcatacacttttgggatctattttacaactaacctatagtcagtgtgttaatccattttgcattgctattaagaaatacctgagactgggtaatttattttaaaaagaggtttattttgccttatggttctgcaggctgtacaaccatggcaccagcatctgcttctggtgaggactcaagaaactaccaatcatggcagaagcaggtgtgtcacatggcgacagagagagaaagagagggggaggagatgccaggctcttttaaacaactagctctcatgtgaacttaatagagtgagaacccactcattacctcggggagggcacaaaaccattcatgagggatctgcccccacgacccagacacctcccaccaggtcccatcttcaaccctgggaatcacatttcaacctgagatttggaggggacacacatccaaaccatatcagtcaggaaatgttcaccccctttctccacctccaaataacaattacacagtacccagcatctgtgcaaacattttattctattcacaattctcatatggtgtaaattgcaatctctctgtagtaggacaaattctagggatgacctctgtattagtcaggcttctctagagggacagaactaatagtatatatatatatataatatgagtttattaaatattagctcacacgatcacaacgtcccacaataggccatctgcaggccgatctgatgtccaatgtttgagggcaggaagcatccagcacgggagaaagatgtagagtgggaggctagacccatctttcttttcacatttttctgcctgcttatattctagcagtgctggcagctgattagactgtgcccacccagattaagagtgggtctgcctttcccagcccactgactcaaatgttaatcccttttggcaataccctcacagacacacccaagatcaatcctttcaatccaatcaagttgacactcagtattaaccatcataacctccctgagaaacacaaatctaggtactcctgtgaagggattctgcaaatgtaattaaagtttcaagtcagtcaaccttaaaatacagagatgatctgggtgatcctgatctaatcacaagagccctttacacaacagaaggggaattcggagagatttgaagtatgaggaagactcaagtgccattgctgcttgaagatggcagcaccacgtgagaaggaatacctcaaggaactgaaagtggcccttgcctaacagtcagcaaggaaagaggaacctcagacctacagctgtaaggaactggattcagccaataattggaatgaacttggaagcagatttttctcagtgcctccaggtaaaagctctgcaaccaataccttgatttccagccctgtgctattcctgagcatagaaatcaggcaagcctgcctggacttctgactacagaactgtccactaataaatttatgttgttaaatttgtggtgatttgtcacagcagcaataaaaaaactaatacattctcttaatctgttttgtcatcaatttttctttgagacggagtctcactctctttcccagcctggagtgcagtggtgtgatcatagcccattgtaacctcaaaatcgtgggctcaagcagttctcccacctcaatctctcgagtagctaggactacaggcacatgccaccatacttggctgatttttttaaaaaaattattttttatgtagagatggggtctcactatgttgcccaggctggtctcaaactcctggcttgaagagatccttctatctcagctgggaggatcccaggatcccaaagcgctgggattacaggcgtgagcctccatgcctagcttcctcacttattttttattaataaaaagtgacatggggagatggtggaagttagagtgatgatatctgagtatgctcttagctttacatttgctcagttccttgtgctgagttgtctgttagggagcttcctgcccttatagtgagaatgtgacatagtctgggcatcagctgcagctctttgaacagagatgatccagctccccatctcaccagcccccaaatccaaaacttaaaagcggagctgctgtcaaggaaaacaaagttaagcaaaatgacttcaaagcccaatgtgctcaccttcactctcccagtgggtccttgcacctgagaacgtgcagggtccatcagtattgacctcccctttccaccagccctggaagttatggaaggggaaggtagcttattctgatatcgtgtcctgtaataatgcttcctggcctggcacatatatccttgtttctgtgcctcttgttctaaaacatcctccctttccgaaagctgaaactgttcctgcacacattatgcacttaaccaggtaaatttcagaagattttaaaaagtttcccagtgaaggaaggagagagaggtattgtcctgagatactgaatatgcggatggccagactagatatcaaaatagaaccctgacccacaatctgtggcaactagcctgggaagccaacatattatctgcagtaaccaatccaggaagcaaagcaataacccccttagcaatggaccccaaatggccaggactcgattaataaactgacagctcccataatttttgcccctacctccaactttggactaaccagagaaagccaaatgggcacccccaaccaatcacatagcatgccgcacttctagctggcccacttgcagcttccccgtgccaacagtctcagggcacgcccaaagtgttcccttttttctaccacaaggcttttccacacctctgcctgcctttaagtgtctgccaaacacaagtgatggtggctgactaccttgcaacctctctatagtaggctttgtttgttcttatttgggtggtcttcatttatttccacagtccttgtttttcagggagatttagggcttaaatacaaggaaatttcatgtaaggatgcaggagtgtttcatggaacctcaagctcaggaaagctgcacagccatgggaagaccctagagccggagtctggaaaagcaatccgagcttggatcttagaaatcttgtcttcttgcaaaccgggttctctggtccaaatggccaaaaacatgaccatggacagggcctgtgcttatctcgtcacctgcagagaggcaactctctgtacgtcctgattccaagttcctggagaaggacacagactgaaccaccttgggtcaggcaccatccttgaccaatttactaacagtgcccaactcccacccagggtggggagtagttgcaggtagtcttgtttatgaacatggcaatcagaagcccatccctgtcactgtgtggaggggaggggagagaagagggatggttccaaccaaaaaaggtagggggatggacatcccaataggggtccactccattcctgatggcacagtgagacagttgtcatgtgtcacgtgctagactcttgactctgtgcctcccagtacctgctactgaccaacatggtctagtgagcgatttttcttgtgaaggcatccatccattcattcattcatatagcaaacaattgtacatcacaaccttatgctaggtgctaggtatacaatgataaaacaaacacaaaaaccaaaaccacaatctctaccctcaatgtgaggagataccaccacataaacgaacaattacaatactgtgaaacatgttatgctcaatctatggcctaaatcagatgagaggctgggcagaggatcaggctgccaagaaatgcttcctagagggcatgctgcccgaaatgaaccttgaaaatcagggagcttgatagaaatagggaaagagagagtgtttcaggcagaagcaaggttcactgtcaaggaaaggcatttcaggaaaccaaaagtagtatctgtttgacatgagctatattggagtgagagtactgggaggtaggctagaaaggggaacagagactagatatgaaggaacttgaaagccgtaagtatatgaagaaggcaatgggctttctacacaggaatgaccttgaagacttgatttgcattattgaaagctcaccatggctggaatggattggggacgtccgatgatgggaagactcagctgggcagttgctgcattaactgtggagttataatggtgacctacgagagcagctttggatacggagaagagcaaactggtttaagaaacgtcatcacctgggtcaagaaaaggacatgcagtgggttgggtagggaggaaaatagatgtaaataaagttattagttgaaaaagaaaagcaagatcgagagagaaattaattctattgccatctattcatgagaatcacaaggctgaatcaaaagccttcctgcaaacctagactcacgctggttcagttcagagactctatcagaaagatgaggagctcatgagtcatccatcaatgtgatcttgtgatttttcttgtgaccacaagacaaaggaagagaagagtactttggagtcattatgatgaaaattcagttgaatacactggaaagtcaaaacgagaggagaaggaggaaccgaaaatctgattcagtcttgaccaccaagtagaattgggacagaaacaattaagtaggcacagatccaatttggattataaaaagctggttcatcaggaaggccactataaaaccagaagcaaacgaagagtcaattaagtacaaaagtttttactatgactatgcagtgaggtccaaactgtactaaatttgaagttccctgccaaagagaaatgtaagcttccctggtggtataagtcagaatttcatgacatcagccagataaccacaaaagaatatatcttttagtgctagatgcttctaagcctttctccacccaactaaccaacattcacttactgatttacttatttctttaacaaacacactccatttcatagccacattctttcaaagctgacaggttgagatatatctaaaacacaaaatctccaacatacattttcttcttcaatgttgtgagatgtatttttctaaaacactgttctgcacatactaccattccaatattaaaaacaagttagttatccactgccttttttgtacaaatgaaattcataaattttaatttggttacaaaaaaatttttcatcaaaatttttgcttatttgtttatataaaaatggagacagggtctcactatgttgcccaggctggcctcaaactcctaagctcaagtgatcttcccaccttgacctcccaaagtgataggattacaggcatgcgataccaagcctggtataatttaaatttttaattaaaaattgttaatttgtctacaaaataaatatatactcatcatcaaaaactttcaaagaagaagattaaaatcaccataattccaacacccagacacaatcacaatcacttctgtaagttaggatatactgacagcctatgtgacagggaaaaaactaagttgtaagaattttttaaaaacctcctattccccattacagtagattttattactcaaaatatttgctgccccaccctggggaagataatacttccccacttcattgcatcagccttagagatgtggtttgaggtgtcccttcttgtgggaggattacatattctcatctccttgacctcaagagtggccatgagacttgctttgaccaatgcaatgataacagaagtgatgtgtgccacttcgaagcagaagctctgattcatcatatggttctactatgttcgttctctcttccatgaaaccagcaatatcccaaatacagactgctggtcccaggatggaaaacttagagcaaagctaccggtagcccacaatgtgagcaagaactgaactttagtcattgtaagccactgagggttttggagttgcttgttaccacagcataacttagccgacactgactgataccacctacctccaaaatgtcatctgagttttctttatgtctgaagagagcctttatgcattgaaataaatactccctttaatttcaacttatattttatatatttaaattatatgttttaaaacttaattttgaagactttaaacttgtgttaatttataaatcagttttgttaatattttattatctacttttatttggttttgatgaatgcccaactggcttgtaaatttgataaggtactcccaaatatttatcaaactttcagaattaagttttagacatttcaaactacaatctaattttaattgatttctcaaggaaaaaaacaacaaagcagactcacatttctataggcaaaatcttaataaacactgaaaacatactgaacttaaaaagtttaaccttacaaatttaataaattataaatttaaagatttaacaatttaaacatttgaacattatttcaaacttagttatcaacatcttataaatttttactaatattttgagtctaatgaatcagtctctttacttaccttaaaaagcagaaaaatatacacaaaatactataatggttacaaaacttatttctagataaaatttatgactagacataacttagcttgtcttccaagggtctttgaaagtatgtttgttttctggcaataagaagatatttccagactcatcttgatatttcctgccgtaaaacatgcaatgaatttttctccagggagcccagtgccctcagggtcttctggctggaatgcagattagatggattggcaaagcagctgctggggccacaaggggaaaccagaaatccacagtaatctttgacctgacgtccttgagctgctgaaccaacatcccaggtttttaagtccctgtggtccatttgtcaaatgcaattccttactgatataatggttatacaaataaagaagcccagagaaagcactgcatatggaaaggaaagattgacctaaaggggaagatcttgtggggaggggaggcagtgaagaaaagaggaggcaggaaagggaactggggagagaggggagatctggcagtttctgtgaaagcaaattagtaaggattttaagaaaagtttgcctttattccattgccataatggggattagaacagtaacatccataggatcattgtgagaattatgccaagcacacattaagtgttcaataaacattggctatcattattattttattatgctgggcctccagaatggattagagttgcagactggaacattataaggaaatccaggaagtccattcattcttactctttccctccctctcctctcttccacaattgctcctctgcacagctgttttaatcctatatctttctgcagattggctttctttctatgtctgtgatgcttaaaacagtcactaacaacatctttcaagtttccaaactccttggttcaagacagcagccatttcgaagaaatttccagaaagacactgattgtccagcttagatggaaagtccactcttggatcaattaactgaagctatgacaggagagttgtatggaaaacacatggctgctcctactagaaaacttcccaaaatatgaaggagggaaaagcagggaggaggtgccgctgtgaagacgtaatggtaggtaaacatttgggtacatttcctttgggtccatgtgcacacgagtacgtttatgcatgtgtgcataacttggatagcactgtatataggttttgtttgtttgtttgattgttttagagacagggtctccctctgtcactgaggctggagtgcagtgatgcaatcatagctcactgcagcctggaactcatctgctgcactcaagggatcttcccacctcagccttaagagcagctgggattacaggtgtgcatcaccatgcctggataagttttaaaacaatttttttgtagagacagggtctcattatgttgctcaggctggtcttgaactcctggcctcacgtgatcctcccaccccagcctcccaagtagctggaattataggcatgagccactgtgcctggcaacagctgtctaaattattttttacaaggcattcagaacacattcaataagatatttttctacagcactgtatttattagctaggttaacatttccatatatagatgttctaagtgaatttaaattatttctattattttgcttttatgaactctatttgagtgatattcttgtaactgaatagttgaaactattattaactccttagggaaattccttaaattggaattgcgaggtcagaaggtgtgtcattttttaacagttttgatacattttgctaaatgtgccaggcaatttaagccacactcccaccacaacatacaaaatgcagtcttcctcaatatcgtcttcagtgcttagttgaaaattaatcaccatttgataagtgaaacaaaatttccttaattactagtaagattgaaggatagtttcatgtttttttgaccaactgtttttctattatattcttattggtttataagagcattttagccggacttggtggctcatgcctataatcccagcactttgggaggccaaggtgggtggatcacttgaggtcaggagttcaagaccagcctggccaacatgatgaaaccccaactctactaaaaatacaaaaactagccgggcctggtggcaggcacctgtaatcccagctactcgggaggctgaggcaggagaatcacttgaacccaggaggcagaggttgcagtgagccaagatcgcgccactgcactccaacctgggcaacaaagcgagattccatctcaaaaaaaaaaaagaaggcattttaattactaaatatattgctggttgtggtggcttgtgtctgtagtcccagctacttggttgaggccaagagtttgagcctgggcaatacaacagggccctatctgtaattacatcttcccggtttgtcgtaaccttgatataatttgttttaagttcagatactcaaatctcttctttccagcacctatctttatctttccatatgcctagaaggatatcatccactatctacctaagtatcaccctttcctatgtcccattccctaaatagagtttagacatttcaattggcatttaaaagtccttcacaaggcactacgatgtcttgtttttcactactgccatccacaaatctttcttttatccatccatttgttcatttattcatttgtcacctatttactaagcacctattatgtaccaggcatcattctagacactggggatacaggagtgaacacatccctacccctaagggagcttgaattttagtgccactgaagacaaactgaaaaggtaagaaaatgtatatagttggctggatggtgataagtactatagaaaacaataaagcagtaaagtagggtaggaaattcagggagagagtgaaatcttacatagaatagtcagggagaacttcactgaaaatgtaatacatatttgaggaagagtgtgaggatggtgactgatatggtttggctgtgtccctacccaaatctcatcttgaactgtagctcccataattcccatgtgtcatgggggggacctggtgagaggtaactgaatcatgggactgggtctttcccatgctgttctcatagtggtaaataagtctcacgagatctgatggttttataaatggtagaccctacacactctcttgcctgccaccatgtaagacatgactttgctcctcattcgccttcagctatgattctgaggcctccccagccatgtggagctgtgaatcaattaaacctttttcatttataaattacccagtcttgggtatgtctttattagcagcgtgagaacagactgatacagtgacagaatgggccaagtgctatccaagggagaagcattccagtatgggaaagagtgtgtgcagagagcctgcgggggagagggggaaggaggagcatacctcctggatttgaacaccagcaaggaagccagtaatgctggaacagagtgggcaaagagggtagttgaggcagggatagggaatgggtcatgcagggttttgtagaccactgtagagtctttggcttttacttcaaaggaaacgggaagccattttgagggtgtggtaaattgtgtttccaaagatggcagcagaaatatctcacacctcacatagtcttttgcaatgtgatcttgtcactgtcctaagaagagatggggtctctttcctttttccttgaatttgggctgagcctaaaccaatcctgacgaacagaatctagttctgtaactagattctgtaatactgtaaattccagactgggccttaggaactgttttagaagccttcctttcaccgcttgaaatgctccttcttggaacccagaaggcatatggagaaagatacgtagaagagaaccaaggcccagccatttcggcctagttgagcatttctgccagcccctagctttcaagccagccagttgaagccgcggacaccagataacagagatgagccatgttcaacatgctctgcacaaatttttcacccccaaaccatgagcaaataatagcaattgttgttttaaaccattaagttttagtgtgatttgttactgatgacaaaagagacaaatagagatgaactaaatagcacgggccacaggggagtaggcacgagaccccacagttactttcctgaaattcctagaccccctcctgcttctgtaaggaactccaggtctgggttaatcacaaactgatgactattccaagaagcactgtactccttagctaatcatctgttagcttatttctgttaactaatggtatttctatatgaacatgctgagaccaccttgttgtatctcctcatgttgttccttaaaatctgcttgtaaccaccccaacctggagcacctcctggacttggtatataagtgcttcccaggttgcaatcctcaaatttggcccaaataaactctttacctatatgcatttgccttagttctttttttttttatttccaccatgcctggctaatttttaaattttttgtagagtcaagatctcattatgttgctcaggctggtctcaaactctggggatcaagtgatcctcctacctcggcctcccaatgtgctgggattacaggtgtgagccaccgtgcctggcccttagttctttctttcagattgacattacacagcaataggggactggaataaaaattggcaccagaacatgaaatactactggaatgaaaacctaaagccaattgctacatgtttgggaccaagtaacacatagaagactgaagagcagtgagaaggctgttggtgtcttcacatggtttgatatttgtccctcccaaatctcatgttgaaatgtaatcctcagcgttggaggtggggcctggtgggaggtgtcatggttgcagatccctcatggcttggtgctgtcttcgcaatagtaagttctcatgagatctggttgtgtgtggcacctctccctacctgctcctcttcttgccatgtgacgtgcctgctcgcacttcaccttccacagtgagtaaaagctcactgaggcctctccagaagccgagcagatgccagtaccaatgcttatactgcctgcagaactatgagccaaataaaccccttttctctataaattacccagtcttgggtattcctttagagcaatgcaagaaaggcctaacactagcctaaaacagggaggaaaaacttgctcttgctcttgtgggctagagaaaagggggcctgagttacatactggcagctcaattacactgtcacttgtagcaatgtggaagatggtacatgtgttcatgaactggctaaggacattttcatgcagagtgctgaaaatgccaagtggcttgtaatagttgataatgtacagaaagagataaactaaagagggaaatgttcacctttcaagcaaattttagaagaatatagagggcccaagactgtctgagtcagttagcagcgtgttctaaaatcaaaataaaacttggaggcaaagaacaaatctaagatgctgtaaccgcccaacgaattttccttgcccactgcctaggcagactcaatttaagacaggggaattacaataaagagtttaatccacacacagtcatctgtacgggagactggagttgtattattacgcaaatcagtctccctaaagacttgggatggggtttttaaggataatttggtgggcagggggtcagaaagtggggactactgattggttaggtcagagatgaaatcacagggagttgaagctgtcctctggtgctgagtcagttcctgggtgggggccacaagaccagatgaaccaatttatcaatctggttagggacagctgatccatcgagtgcagggtctccaaaatacctgttatctggaggagcaatttggaggggtttagaatcttgccacctccagctgcatgactcctaaaccacaatttctaatcttgtagctaatttgttagtcctgcaaaggcagtttatagttcccaggctaaaagggtgtttgttcagggaaagggctggtaccatctttgtttcaaagttaaactataggccgggcgtggtggctcacacctgtaatcccagcacgttggaaggccgaggcaggcagatcatttgagatcaggagttcgagaccagcctggccaacatggtgaaaccctgtctctactaaaaatacaaaaattagtctggcgtggtggcgtgcacctgtagtcccagctactcaggaggctgacgcaggagaatcgtttgaacccaggaggtggagattgcagtgagccaagatggggccactgcactccagcctgggtgatagagtgagactctgtctcaaaacaaaacaaaacaaaataaacaacaacaacaaaaaacaaagttaaactgtaagttaagttccttccaaaattagttcagcctacacccaggaatgaacaaggacagcttggaggttaggaacaaatcagtaagttaggtcacatctctttcattgtcataatcctctcagttataatttatgcaaaggtggtttcgatgccacaagtaaaacgtggcctctggtcaacatgaggccctttgttaaaatcccagaaagatgtaaggaattgcttctcaaaccctcatggttagttagacaaacaggcttctgaaagaacaagtgtgttctcacacagcaccctgacatgcaccccagagagggagcgtatcttaaaaagattggtggagatggtttttatctaacacagtgaatcccagtaaaatccacagaaaactcacaatgtttttaagagaactgaactaacacaagcaccactagcttggactaaaatggacaaagactgttcaaaacaaagccactgggctcctaaccatttactggcaggaaataggctgaggaaactatttggctgcaaatcagggtttttgttgttgagatagggtctcctccgttgcccaggctggagcacaatggcacaatcacaactcactataacctctgcctccctggagtagctaggactataggcacatgccaccaagcccgcctaatttttgtattttttgtagagacggggtttcaccatattgcccaggctggtcttgaactcccagcctcaagtgatcctcccgcgtcagcctcccaaaatgttgggattacaggcatgagccaccacgccaggcccaatcacgctttttcaaatagtaaaggaaggccgacccagaaggtggagttaggaagtaaatcaggtccagctgtgtgtggataaggctccacagggatggctctgtgggtgcagggacccaagaactaaaaagacaagttatctgcctcccacattccttgtacaatgtgaggaggaaaaagataactacaatagagaatccctttcaaaaagtaaggatgagtgtatgaaatctgaataaggtttgcagtgcagtttaaacagttcatagtgtccagtgcttctgataggtcaagtaaagtaaggacgatggacgtggcaacatggaagtcacccatgacttcgaaaagcagttttcaatttaagtgtgtgaaagctt

SEQ ID NO: 49 - DNA, 116840 bp, Homo sapiens
acaaacacatcacaaaagatgatatggccaataagtatgtaagatgctccacatcattagccaacagagaaatgcaaatttaaaatactagaagattctgaaattagagaagcagtaaggaaaaaatgctagaagatatcacttcacaatggctaaaattgaaaagcatgacaataccaagcattggtgaggaagtaactggaactcccatagaatgctggaaaaaacttctccctgagaagcatggtaagttgcaaattgtgtctctgctgttctcttgtatccccagcatctggcccctacttggcacccctacactcacagaggaggtaagttcagctaggaacttgttttcctgtttgttttgtttcgtttttgagacaaggtctcgctctgtcacccaggctggagggcaagtggtgcaatcatagctcagcgcagctagggacttgttgaagcggcataaggtaagagcgccttatttatatctgcatcggacaaagaagcagcttcgagacacaggactgggagaaaaacagggctggcaactttttattttgcaaagtaagagtgttttaaacaattttaataaaataaaaaccaaaaagcagccaggcgcagtggctcacgcctgtaatcccagcactttgggaggccaaggtgggcagatcacgaggtcaggagattgagaccattctggttaacacggtgaaaccccgtctctactaaaaatacaaaaaaaagaaaaaaattagctgggcatggcggtgggcgcctgtagtcccagctactcaggaggctgaggcaggagaatggcgtgaacctgggaggcggggcttgcagtgagccgagatctcaccactgcactccagcctgggcgacagagagagactctgtctaaaaatacatacatacatacatacatacatacatgcatacatacatacatacatacatgcatacatacatgcatacatacatacaaaaagctaccaagctaccatctactgtctcatcattccctaaaaattattagctttgctttcagaagaaaaacaaattatagttcttttgaccctttccaccttcgtacccccaaaaaacagaaagaacgtaatcacataatcccagaattttttaaagaatcaatttagctttgtgagaaaccaactctgttgtcattctttttctcattttgccacatttagtgatcaccattcagagatccattcattggggtcctgaggcttttctattatgaatcaccaagtcaatttggagcacccagacagacgacctgtcccaaggtcaaggttaggagtcagtaagcttgctcagagattaatttaaaccatttgctctcataaatcaagccatgaacttggcgtgtcttcaggagcaggcagaaggaaaagccagtgaggacagggcagtcagggaggcaaaatccccacagcaggaggcagagggcaaagttaggccaagaaaaggaaaggtggagggcagttatgcgagaagaaagatttggaagaaaagggaaaggaggcagaaaataagccgaagggggcaacagtgttaagggtgtggcaggggcttggaagaagcaagggagggaggagagagcatggaagtgaatggagggaacagcctgctctgcagcatgtctcctacccggcagggccagaccacagctgcacacgatggacaggacttgtttgggcactgctggatttcctggctgctgctggctgggggtatgtgttccacatttccccgttcaaggggagggcagagctgccctttgggttttccccagaacatttgatcaccgcaggaaacatccttctcaggagcagcctcttcctcctcctgctgagcaagttcccagccagccccagagttcacttgtttaggtctgagcagccaattagtcctgctttcctcacacagttgtcctcctaaaactgccttgcacacccctcagggcccctttccatgtatttcatcgacggctcgcagcccttccatccatctccccgtgtttcccttttctcaccccggcttctggctgccggttattcattcaccatgcccttccctggaaggtctattcgacattcaacccattcattgctcaaggtccactcagggttgccctcctccgggacgcctttccagggttccacagcagagtgacctctcttcctcatgctttctttgagcagtcagctgtcaagcctcatctcaaccacttgtcagcacaaactgcctcctgctgctctccctttaggtaagagcactggcttccctgggaggcaacggaagactcacatctcgggcaacactggcacttcagcccaacgtgggcagttcaagccgacctacctagacctaattcaccacagctacccccaacccaggaggtgtcccagagacccttcgtggcagaagacgtagtaagactagcggaggacgctgagctagaacgggatcagcagaggccggattcagcaaggcttgagagatgcatagagggagggcgaatctaagggatctcaagagagaggaggtggcttgcactcccctgggagataccagaattctggagaaaaagaagaagaatacacaggccaaatggggccatggatttttgagtatttggaaacctacatctgagactggattctaaaggtggatttctccagatacggaggaagcggctgtggctccctctgaacaccagagggcactgcagggagtgagcgggcctgccctccagagagcaggctgcagtgccgtctccacaggctggcattgaggtgggcggcctgctgtctcctgactgccctgattggacttcagtggacatcccaggaaaaagggatgccacacgactccaggcagcattgtttcgttccatatggaagcccagatgtgttctaggagggttgttacacaatacacacacacacacgcacacacacacgtgtgcacacaactgggccccaaatcctaaaacatcaactgggatttttaaaaaataagcaaaaggaaaaccacatacttaccttcttcctaattaaggaatgctctctctgaatcattctctcagaaacagctgtgtctcctacagacccatccgctccatacttcttttattaagcccatactttgagcatgatacctctaattgccatgaagaacacagatgtagaacatctacctgtcccttgtcctcaacagtgtaaaacgcacctgcacgacctcttggcccccaccccctcccctctggccactgtgctgcctgcttataagaggctcctctccaccttgctgcagccccgactgtctcaccgagctgagggagacaagcacttccctgtaccctctgagaaagccatcgccatagttcatgcatctagctcacaagagactcctctgaccaatggcattttctaaaacagcagaagccccacatccagaagggagcttgaggaagaagccaaggcccctcctgagcttgcaggccctgccctgccgccatgggctcaaaacttcccagtgaggtgttactaaaagtcacagctgaaacccacggaatgccagtttcatctcccaaactaggaacgaggagtccacctctcagaaccacctcaaggaagtattcagaacaagcatcgtcagcatggcctggcaaaaacagggtgaaatatttgaaaccatccaaatgtcccgcaataatagcttggttgtatacacgaggcacatccattcaaaggaatgttgtgtagagccttgcacataggaggtgtctgataaatatttgttgactaatttttaatattttcaaagaacggtggtgctgtttcttaaaatacataaagggatacagaattgtaaacatagtatcataagcctggcaaatactgtgtttattctgaaaactcaggaagaaaatgtttgcaacttataaaactaaaattataattatttctgaggcatgcagtttgggtgggtgatttttagtctcttctttattattgtcaattattgtttataatcagaaaataatgagagatttatttatttaaagaccgcagtgaggtcccactgcctgggtcccacacgcgtccagtccatgccctcggtccccattgagcctctcttaccagggggcaggggttgcaggtggtcttcctgcactccagcttgaatccagagatgacccccacctgcaccatgcagcggcaggtcgtgcacacatcgatcatcacagtcttcccgggctggaagcagaggcaccagggtcaggccccccagcatcccccaaccccccactcacctcactctcataccctgtctcctgcccacccacccatagctcccatgagccatcgctctgctgctcctcctgtctcctatggcccactgccttcccgtcctcccacctccagtatcgagatggtaagagtgagaactttcatgccaaagaggcagcccaggtagtggcagaggggacaaactaaaacgtgcacaatgacttcagagtgcttctctgcacacagaagaaatgcacaggtgcctgaggtgggggccaggaagtgagtgtgagacaggcccggagagtcaggaagatggtcctagcctgggctccatgatgccaggcacgtcccacaggcagtggaaagctggggttgggtctctctggtttccttcatttctgctttacaatgacttgcctgctccccttcccacagtacccccttccctgtccccaccacttgctctggagaagaggacagcggctcaccccaatgacagtgccattgagcatgcaggcctccatgcgctctgggggagagaaaagtgcagagtgagagtgggcaaaacacaccctggtgagaccggcgagcaggctgctctctttggggctcctcctccgtgtctgggcctccctcctgtatcggtcggccctttccccccaccccacaacccagcgctgggggtcctactgctggagcccacagcggcctcccttccccatgcagcccacaatgagaagagccccgtacgttctccaagtgacagcgcttgcttatgtgaatttacatttaagagatgggatgaatgggaggatgtttgggtttatgaaacaatgaaacgctactcttgaaaatttcagtttcaagaattcagtggccaggcacagtggctcatgcctgtaatcccagcactctgggaggccgaggtgggcagatcacttgaggtcaggagttcaagaccagcccagccaacatagcaaaaccacatctctactagaaatacaaaaattagccgagtgtggtggcgcacgcctgtaatcccagctacttggaggctgaggcaggaaaagtgcttgaacccaggaggccaaggttgcagtgagccaaaatagtgccactgcactctagcctatccagagatagcgccagtcactccagagtgagaatctgcctcaaacaaacaaacaaacaaataaataaaattcagagcaggatatggtagaaagaactagtttttgttgttgttgccatttttctgtttgttggcagcgttggggtggcaagttgaacgccttcccctgggtgaaacgtcacagcatttcaaaggtggtctccaaatcagagaagcctagggccgaatcccagtcttgccatgtagtgatcttcaggaaattcctatggttttcccatttaatttgctttctcataaaagcagtaggagcagatgggaagatttcggtcctatccatttccctaagttgctaaaaaggcaaagaattcaggagccaaaagtggaaagagaggcttaaaggtggtgcccggtccagcccagccccagcctgcatgccttaccacagcgacagcttgggcagcacgctgaggtcttacagctcagctgaaagcccgaggggcagacagggacctccagctgggggcaggagacgttcctttgttgtataaagacctcctccttcactcggacacactcattgatgaggcaggggttctccggggaggcccactgggagccgacctgcagggcaccagagttagtccaacaagctggggcagggctggagcccagggtcccattgggaatgtgctcttctctcaggaaggtggtttctagacgtgaagcctggcttaacatgtaagtcccaccacagggtagggcccacggaggggatgagtggggctcgtctcagtgagcaccactcaaacagtttgggtcaaaatcacctgactgaggcacccaggcaagcaccttggagaagccaggggactcaccctcccttcctcagcattggtttgagctgagctcagatactccggccaagaagcagcactgtgggccatcagtgggaaggtgcagccgggaagctcaacccatttcccaggctggtgccacttcccatggtaaggggagacagggagctggcagaagcccgggaaggctggcctgggacccctgcagccctgcaatctgtccacgaagactgcacatgggtagcctgaccccaagggttgtcaccacgggcaagaagctgaaagggcccaagaccatggttcagaaaagtcaccaggaggatcttccccagaaaatgtcactccgagtgccctctgtgtcggccagcacccagatatgtaactaggtgccctctgccgccatctcaggccctgacctacttctcctggtgcctgcttatttcttctccttccagatgaggtgtagaaaatgccaaacacttgcagccattctcttcaccccccactcctgactccctgtggccaaatcttcccactgcaggcctgattccaccctccagacttctccctcctctgattactcactcactgagccttggccactggctcattaagaggacccattgccaccaccccccgctgacccctgacatggttcagcagcaaagccattgccaacacccaagtcttttaggtaagatggagacttgaggtagaggagagaagcccaggtcaccttatgctttgcaaacactgatgaggggcagggtggggtaggccttgaagggagatgagagatggggaaaggggcaggaatactgagcgcaaagggaccagctctcagccccaccaggatggggcagcccctgatctgagctggaccttgaccctggggagaagaaacaaaacctgcctccatccagggcacatgggagcagaagcactaaaaggtggggaggggagaacacagggaagagaacccataggcaactcggactagagggggaggtggaaactcacctgaaaaagcccagtgagtcattctgttatcactggggaggagaaaggcaatgggcctgggtaggagatgggaaaggctcaggacaagatagcagacctttggccttcctctcgaagggaagcgcattggtcttgctggggaagacagaggcaaggcccatatgggcagttcacctgttcccagcaccagctcccaaggctgccaggacttggcaccacccaccttatccttctgaccagactgaaagaactgtgattctcctagcatctggactaaaaccgccaaagacggaatcctctgtgtttaagaaaatggcttgatgagcatcagagtctaagagagaacctggcagcacatgggggacagctgaactgctctgtgttagaagaagggactggcgggggtgagccagccaggagaggacaagagtggggcaatggggggctggcaagatgccccagccagacctgcagaaatagcagagggactgtgggaaatactgttccttttctgggttgtaaaggtttccacctccctaaaaccaccaaggaggtttcagtagaaatcagtgaaaaggtctgaggaccctgcctgggttgatgtggtccagaacagtacttgcagcctgtggcactttggaggggtggtgaggccatcccaaaaccagcccctcagccacagcacctcagattcacaggtgaatgagagagcatgaatccccctgggagggccctgggcttctcccaaaatctacaaaatgggaaggctgaggccgtcttaactggttcctaaggggcaggtcatcccagctggcatctggataacaccaacagctgggtgaaatgcccagtggggaaagcaaagggcagggaatgagatgaaaccaaggtcaacgctggtccctggagtggccccaatctgccctcctccccgtcccgggggcctggacctacactcttccaggaagactgggagtccccccgcggtgagccagtcaccacctcacaggcagatggcaggcaccttccacagcactcgccttcatgcagaacgtaagtgaagccctggaaaagcagaaaaaacagagtaaggacaggccagcagcaaagacacaggggctcttacctacgcctcctgcgtactgagccctggggttgtgccaagtgatcactggtctgggcattttcatctttgttgtcaaccagcctcagggccatgccaagaagcagcaaccaccaggtcactaaacgaagtcttacatcagctgcagagatataattctgccccctgaaagatcccactttgagagagaccatgatccagtccataggagcattaaagacagcccagagttcccttagcagcagcttactaatctggcccttatcatggccaactctagggaccctcactgaccgggaggcacactcaggatgactgggatccagtctccactctcgcagggctagcctcccatacaagacgaacactcgatcccaatactgctcaccaacgtgcagatttgggcttccccaagaggttacttgacatttacctagtaatttatagggtacggtgttctttacaaaagaaaagtgagatgagagagcaacagacaaagcttccccagaaagcatgccagggagaccagcatcctggaagtttgtcagcccatcttgcctctagaaggtcctccaatctggctaaagcatcatgaacatggactgaaaccctcctctgaaaagtctatagaaagaatagtcaaagcaatgacagtgtgtttgtcccaggagccaagagaaaagaacccaggactacgttccatcttggagctgtgtccttaagagagaaagagtaaccacagctgttcaggacgggtgtggatggcagcctgctctgctccccaagcactctccccagcagggccgaatctgaagatgcacaacacgtgtgcctctctctggacggtctcaacactcctgagacttggctcaaccccacccagtctccacgagacctactgatatcaccgcccacctcccagcagtgtgcagtgagctgtctccaggcttttatcagccaagattctagtcatttactgtgcacctatgatgtactaggtactacggaggagacaacaaattaggatgcctcaatctgtgtacacaccctccaagatacagcagaacattcaaaatgccattaaagaaaaaaaacaaggtctcagggggtcagaaacaaagactcaaagaacacagaagacagtaattaatacctttagggatctgctgtcattctcgtacgcctctctagaaggctgaatgatcgagattcgcatattatttttgtttcctgttgcctctcaccatgggcaaacagtgtcaatattacggatggctcccaggccagatgtctgttcccacagccccactagcttctcaaacccagacacttttagccatccctccaaatttccatctttctaagattcccctccataccccacagcaaccctgttttctggctgcacaaccagggtccaacctatatttttcaattctttattttcccttcctccaacaaattccctcgcttatatcgacatttgatatcttgtatcaaaatacacatcccaggcccttctcctggctctcttctccaccctgttttcattggtttcccaaataagaatgaaactaagtaggtctactagccacccaacctgaaaacatatgcactgaaaaataaattatgaatgtatctagcagcacaatcctttaagcacaattgctataactgaaatggaggtggtagatgccaagctctggtcacttgtcccctctgaggcaatctgaggagcacagtttgaaaagctgacttcctgggtcagactggcccttgcaacactggagttgcgggttgtaccagcctaacaggacgagctctgggctcgggtcaggaccctccagtgtccacaggcttcatataagctacagaggttctggccaaccccattccctggggtggccctgtttcctgtctgatactgagaagaacagccctccctcttcttcttcctgaggagtatcacagagtaaataatatctaatggacttcctttggcttctcagaatacagttcctacaccttgactgagcctcattcaggagcctacgggtgaggagtcagatggccatcaggcttcatggaaaatcccctcaaaggcttgtacagaggtgcaggcctcctctcactatggacatggaagcaaggccatcgcctgaggcccgcttagaacattcctgagaagccgccaatgcccctgcttgcctgccaccattcctctgacacgaagagcagagaactatggaggagcttggggaaagtgtgtttctgcagactgtggcttcagggtgatgatggtagtgttgttctttcttttctgtcacaacctagacaacacatggaccggcatatatgagcccaagtgcctctgaggtcggaccagagctaataatgctaacaatactaccctctttgcagaatgaagtctgagaccatctgtaacttacttaagctcccacctcactcaacacagtacagatcgaagcccagcctcccacgtcccctgagattttaaaccatgaggctcccttctcctccccagaagatgtgaacattcagcctctaagacagggcactcgattccctagagcaatcacacggtcaagagttctagacatggttcctcctccactcctgccctgacctccctactcatcttctttttgaaacttcccccagcttttctacgcagccaggattataccccaggacctgcagctcccccaatagttgactggaccagagcatgaactggacagcggacccgatccaagggctgagctgggcctgtcaactttcctcttgagaagttgatccatgaaacacaaagaccaactaagtcagactggacagggatgaaccacggatctgaaaagctgtgtggagttgaagtgagatttaacaaagctgtgtgtaaacaaaatgtgtgagaaagcaaaacttctgcacagaggaagctggcctgcagtgaggagctggagcagacggacagaaataccggctcttaggacaaatggagagacatgctgtaggaccacggtgcccacctacaaatcctgcacttcctgtctgaaagatcctcctgtatcttttctacaaatccccttttattgtagctagcctgaatgggttctattctttgcaagcaaaactccccactgaaacacgaaatatattggttgtcaattttctaaaaatgacctctaagcagcactctctttatttgacagcaagttatttccctggcctcagatcgcctgtgagaggagaagaaaaccaaagggtttccaaaacttagtgtttcccacaggaacacctggataccacagcgtcatcctctcccaaaggtactgagcacctccgctcactctcagtacccaaatgcaagtagaatagcaggtgaagggcctgggtttcgggatttgccctcaggccctcctccgtcaaaccattcacctcgaaaacaccttcaggaactctgccttcactgccattgacatttgcaaaagcaaccacaagatggatgtgctcgcctgccctggcacctcttctcttaacatcattatctgctgataataatgtagtaataataatcgcattaaaccagcaagcagaattttacccacagtcctccctgcagattgttgctccctttttctccagtctgatccatcctaaacatgcaagaatagggcaccccagcacacacaggagcctcaggggcagccaccacgaactggatttgggaaacagggatcatgttttccgtacctcaaattataaacatggtctgaaaatcaacagtctatgtggaaacaccagagtaaactgaaacaaggacgatcctagaaaattcagagcatacatttgttctagggacaggcgaaggtgatacatgagggtggaagaaaaaggaaaacttcaagtcctcttttctaggcatttagtcctccccatgtctctgctcaaacctactccaccagtactttagacttaaggccatacaacagacgtgaccattagccaaggactgaactgcagaaggatgacgcagaaatcctttgctcatgctttttcttcttacccagccctaaccccctccctcttcctcacccctagccttgaaccagaggtcactaaagaacctttcttgcccttcctcgtgaacccgggaggcagagcttgcagtgagccgagattgtgccactgcactccagcctgggcgacagagcgagtctccatttcaaaaaaaaaaagaacctttcttacccttcctaagatgccctcctctactttcccgctctgatagctgcaggcatgcccagcccctgccccactcaccgaccgacagctgtcctcacagggcttctgggagcactgggccacgcggaggcccatcacggcatcctccatgtcggtgcaggtgcacacatcgcagccctcctcccagaactggcccacagggtagatggtgcttcggtggacacacacctgtagacataagttttcgtgagtgaactcatttgtttcattgaaacaagcggtgagttagcacctactacacagaagccgctctaggtgctgagaatgtggcaataaataaaaccaaatgtggtctccgcccatatgcagggctgcttataaagcagatttcgtcctcctcctttccctgcccaccagccttagaaaagctatgaccagtctctcaggggtggcccctcgtgaggccttcatggtcccacagacttgaatacaacacactggctgccttggtctcccttcttcctgccttaactgcacttcactccttcctatgtcaccgagaagctgtacccacatgcccagacccagtaatgtccttggacttggagcccatcctcatcgagccctctgcccacttacgagcaaattgggcaggggctatgaatgcatgtccccttgcccacgagtgactaggaacataacaagtaaagactctgggacacagagcaggggatatgtttgagagacaagggatcctattgggaagaacaataggctctggtagagatgtgggaaaacagatgaaaaaggctggttgaaagggaaacgtggaaagtctgggatgcacgccacagacaatgctcggacatccttttgttggaatgaggagctaaggaagctgtttgatcacgggacttaatgacagttttgaaattaatcccaagtatgccctccaaagttatgcaaaacgggtctccaccctgtgaatgtcataatagcagttcaaacattttgaaaccattatcatttatcttctcagtcttctagcttctgtataatgaacttactgaatgagaccccttgttctattaaaaggcctgcaggaaaatgttaccatccctatggagaagaattgtttagcaatacttagcaaaagtaaatgtgtatttataatttgacccagaatctcacttccaggaatctatcccaaagacacactggcaagaccacaaaatgacagatgcacacggctgtttgttactgcaatttgtaatagcaaaaggctgaagcaactcaaatgtccaccaataagggacttgttgaaacaaaactatggtgctgccatgcaatggagtactatgcagctataagaaagaataaggcagatctctacacactgatacagaataatctccatcaaatattgttaaatgagaaagaacaatttaaaatataattcataatatgcttcctttctatgagaaatgggaagaaatatacatgtataaaattcagttatattttcaaaaagagaaaaactaataaaaattataaaggctgggcacggtggctgatgtctgtaatctcagcactttgggaggctgaggcgggcagattggttgagttcagaagctccagaccggcatgggtaacatgatgaaaccttgtctctacaaaaacatacaaaaattagccggatgtggtggcatatgtctgtagttccagctactcaggaggttgagggggaggatcgtctgagcctagggggtggaggctgaagttagttgaggtcgcataactgcacttgtgcctgggtgacagagcaagaccctatctctctctatatatatatatattatatattatatatattcacatatataaattatagggtggaggaaggaataaggtagagaaaacacagagtaagactcctgggaatatgtcttgttttataatttggggtttaaaatcatttaagtgttttacaccatagtaattttaaaatttaaaagaaataaaaagcaatccctaaaaatggaaaacaaattgaaatattaactagatatcgtcagtggcacataattattatttataataattatatgatatattacatcataatataattataatagttatttcaaatgacttcaaaacctagtatttacacaaatatcccccaatgaggttttttttttaggactagaagaactgaaaggaaattttatgtatttatttattttttgagacaaagtctcactctgtagcccaggccagagtgcaatggcacaatctcggctcactgcaacctccacctcccggattcaagcgattctcctgcttcagcctacagagtagctggaattacaggtgcacaccaccacacccaactaattttttgtattttttagtagagatggggtttcaccatgttggccagctggtcttgaactcccaacttcaggtaacccgcccaccttggcctcccaaagtgctaggattacaggttagttttgaaactattacaggtatattgcaagataaagcaaataagtagttaattatgttaggaaaccagaattttcaacttagaagagaaatgatacaagcaaaaaatcaaggaagtaaagtcctgtaatttcatttgaatcagaaataccactacaaatttacgagtttttatcctctcttaaaatatgcatttctaagctctgttcaccaaaaaggtctgaaggcaatggcaacccagagccataaatattcttggcacccagatcataccgcctaaataccactttcactaaaaggtagggggacttttgtcaaaatggcagatccaaggactagggcaggaaatgcccagggtgagcccagcacgccttattgtttcagaaagcaagaaagctacgaaagactcatgaggccatgccaacaggctccagagccaacttaaaagagcccccatttaccccagggaggacaacttgaatatcaaaaaaaaataaagtttacaatgaatcaacacacatcaaacacataagaatccatgagttcataatgaagctaaaaacaaaaaacctctttcgctgtccttgacagttgctagagcatcaactcatggctatgaaaactggaaaagaaaaaatcaagcacttattctactttgtctaaagtaattttatttcagggtaactgaaagcagttgggagaaagttctttcttacgggagaattccagttaataaatgcaatcagtatgatagaagtagagaaaagtcacaattttgaaactcctaatgacataataaatcttagacaacaaacacttataaatagtaaaactataaattgttgatggggtaaacttcacaatgcagaaataggttgcttcatctgaacacataatcagtcctatctctcaaagtgggatagctgggccaggcatggtggctgacgcctgtaatcccagcactttgggaggtcgaggcgggtggatcacaaggtcaagagattgagaccatcctggccaacatggtgaaatcccgtctctactaataatacaaaaattagctgggtgtggtggtgtgcgcctgcaatcccagctactcaggaggctgaggcaagagaatcgcttgaaccagggagtacgaggctacaatcagccaagatcgtgccactgcactccaacctggccacagagcgactcaaaaaaaaaagaaaaacgaggccaggcacggtggttcatgccagtaatcccagcaccttgggaggcagaggcgggtggatcacaaggtcaggagatcgagaccatcctggctaacacagtgaaaccgtgtctctactaaaaatacaaaaaattagccgggcatggtggcgggcgcctgtagtcccagctactcgggaggctgaggcaggagaatggtgtgaacccgggaggtggagcttgcagtgagccaagactgcgccactgcactccagcctgggcgacagagcgagactccatctcaaaaaaaaaaaagaagaacgaatgaaaagaaagaaagaaagaaaagaaagaaaggaaggaaggaaggaaggaaggaaggaagaaaggagtgagggagggagtgagggagggagggagggagggaaggagggagggaaggaaggaagtgacgtagggagggagggagggagggagggaggaggacagctggacattatgtgcctctgggtgtgatgcacatggcacccttgatcaggtattcttgcctccctactgcattgaccttgaatgtaatgaatcccctgggtctaacttctagtctactggaaatacaggggatagaggaacacattatgcaataccataaggtggctgctagtcaaatccagaattcatgacattctacaggacaaatgacccagcttccccaacaaatcaaaggcataaaaatggggagtggcattactatagattaaagacacacaagaaacattaatagaaaaacagcaaggcaggaggggtgggcaggaagacgagaaggagaacagagatataagaaagcagcagcagcaactgtagcctcctagacttgttcccgcttctccaaaactgcgtgcttagaatccctgagctggaagagcgtccagaggggaagagaggtcttaagcattccagacaaataaagatctgttccagccctaacaggctccaaggagagatgactgcagcttgtctgtcattcatgtcaggactcccctcaatgcagcagctataactatgctcaggtcttcctgctgcagttctggctcatttcagttctcactccgccactttcgcgcccttcactttcccactccatcaattaaatctttaatgatagctaatcttggtggctctttcacctataagactgctgtttgtaatgaaaatctgtaccattcgttgacactttattatattcagtttatagactattgtcatatatactaacaagggcatacataggaacttcatcttaacatttctcccatagcacctagcacagtgccaattctgttagaacacagtagttgcttagtaaatattggatgggcagatggatggatgaatggatgggtggatagatggataaactgacagcaataaataaatgagtaaactattaactgctcgtagccaggtgtggtggtgtgcacttgtaatctcacctactcgtgaggcagaggtgggaggatcacttgagcccaggagtccaagaccagcctaggcaacatagcaagacctcatctcaacatgtatgtataactattaactgatctctaaataatccatgcaatcatgttatttccttagctaacctaaaataagcttataaaggtaaagaccatgtcctgcacattatttgtaacctcagcacctagccatgcttagtacatagtaggctcacaagaaatgcctcctgagttaactaaatttccactcaggctgagctggaatgctgactgccccccaaccaagccttgtagcacttggtttgggcaagaagggaatgctgggtaggatgcaaatcttccatgaggagcacacgttgcttagcaaatattggatgggtaggtggatggatgaatggatgggtggatagaaggataaactgacagcaataaataaatgagtaaactattaactgatagttaatagccaagcagtccttaccttgtcgggaaggcaggtggttgtggtacagccacagtcattggtggcggttgaggccaagtacccaaggggacagctcactgtggagttgacacagttgcaggcacactcatactcatcacagcactgggtcttccgaagggtgggcaaacggtgcggggggcaggagggtggggacactcttttgcactcctccttcctgcaggctgaggataggacaaggccacactgagcactgcgcccagccagggctcgtaagtattcagctatgctatagggtgccagggagctttagactcagaagattaagtcagaaatgtgtgagggccaagctcacgggctgggagttattcaatgttaccaaaagcagtccatctgcagaaaaatatgaacattaatcaaaaagggaaatgtgaagctaggaactctaatggaggagaagtgaaggctgctcaatccctgctctatcactttcccacatacatctggaaggggcgggttccttcattctcagaggtgtcagatgtagaatctctaagtccagtaggtctgggtacaccacgccctgctaagcactgttctatgccaggagcttctgtgatcctatccccacctcagtacctagaacaataccctacactttaggtccgccagcaatcagtgtggaatgaaagattgccagcaatcttgtcaaagccacaatgtcacttttaaaagaccaaatcctgtccctgtgtcctttgcctgtttccagctcccttcaaacacaatgtgctctcctcccaccttgaagtctcacatctaggaagtcgggtgagtgtccacatcagcaggacaagaacgccaacggagttagagtggggattctcgggaggtaaatacagaatttggtttcttgtcgtgtcttattttagtccatcgctatgtttaagttacagtatatagtgattacatatatacaccttcagaggcgaaaaactataaatttgtttgggaataagatccaatgatgaggggaagtcaaggaaacattccctccccttgatgacatacaggaggatgggcagaaataaagattagattcggaggcctcctcatctcagccccagctgcttcttcataaacccaagacggaggtgcctgtggctgtgcccacacctggtatccttcagcagcgtgcagccggaaggattccgtgcaggtgtgaccctaacccctctgttccagatgtactcccaacccagattcagctaggtagaaaacaggaaatgacgtgatcttggaagaggtccctgaggaggatggcctccctcacaccagcagagagaggccacaccacccctcctcatccacagaggccttaccgcaggtgaagttgggtctgcactcgccagggttggtcagtgtgggctggaggccacgttcacagtgaggcactgggggcaggtcacagctcactgggtcacacactgagggccagaaagagagacgtccatgcagagttcagaaaggttactcttttattacctgtgagtgggatgctacattcctattcatgcagacttctactgttttaggtaagtgatgatgatggagacagagattacatgggttaggatagatagatagatagatagatagatagatagatagatagatagaatgataactagatacatgagatagatttgatagatagatacatacatacatacatacatacaggatagataactaggtacattagatagatagatagatagatggatgatagatagaggatagatgatagatacacagcttagagagagataggatagatgataaaacatagggtagatagacagatagatatagaatagatgatagatacatatgttagacagagataggatagatgatagatacataggttagatagagataggatagattataaatagatacacaggttagatagattagacagacagatagatacatacatagatataggatagataactagatacaatagagatagatagatagatagatagatagatagatagatagatagatagatgatagaggatagatgataaatagatatatagcttagatagagataggatagatgatagatacaaaggatagatagagacaggatagatgataaatagatacataggttagatagagataggacagatgataaatacataggatggatggatagatggatagatagatagatagatagatagatagatagatagatagatagatagacagacagacagacagatagatcaatccaagtcacatactgattattcttatcatccactagggctttcacatctcagccaagtcaacttggatcctctagacctgtttcttcttctggaaggtgggaactctaccttataggatcagtctgaggagttcacaaaataataagggcaaagtgcccggcacattgtaggagactagtaatgtctataaaatgaggggcttgaagtaaatgatccctctagttctctctactgctaacattctaagacctcctttacattaattgttctcaagccacatctccctcccctacaggacttctatttatttctgatcaatttcacgagtacaaataagtttctccgattatatgattttcttttagttccttggactgtcccctgatctatctgctctcccttcaatatctgcatcactgcaaattgtacaagcctgtgctttaggtcttcatctgtacaagcaataaacacactggacaggactgggacaaaggcactaatgatttcctgccatgctaaccgtaattccatcagctctgaattcacggacttataccattattcagcccactattcacagagcagcctgcaaggctagcatgaaaacctctagcaaacaacctgctgaactcaaggtgcccagtgtgtggtcttctctatatctagcagcctcaaaatcttattgaaaatgaaaatgggttgctttggcatgaccttttcttcagtatatctccatagtccccagtaatcaccccattcttgtattaatcctgtcaaacctgtgtttagtaatttacagtagattcttctaggaagcaaatcctattctccagaggtaaccctttccacttttttggagtatccaatcggtccttacccacctcctttcacacaccctgtgcctgagaacagagacacctttcagcaccttcaacgtggtgccccctggggctagggttgggccctggagacatccccctggtgggacacataccacactcatactcggggcagcactggtctgcattctggcggaggcgggctacttcacacaggccacacgtgggagctagaggagaggaacggccacaaaagtcagagaaattagtggtgggacagcctcagagggatttgaaatgttcttgctcactgaaaactagtaggagttctgtacggtcatcccacaaggatccaggccacgggacctctgacagatgagtgtccccatgttcctgttgacaccctcacatttaccctccaggggactcttaagtctgaccgttgctggggaccagaggcgagggttaatctgagaatgtcgaccccaggtgcagaatggggctcccaggcccagtgatgggaaatgcaggctgggcaaggaagcccacccactctaggactctaggtgccagtgtttgagtctgctctgccagaggtgaagatgggtggctggggggccttgcaggggcccttgttcctccatgaaggcaccagggaggggaggactctcacctttggccgtggggcagggctgcgttgtgcagttgaccttccgcccgctgaggcatgtgcagatctgacagggctggtggtccgggacccaggcttccaggaactgagggcaaagcaaggttcagaaagggcacaggacattctaggtacgaagcccagaattcacagaggtcagctctccctgcctccggcaagggccagtccctgacccagccctctgacagagcctcacaggcaaacaaaagcaggctgaaaggaggttgtgaggttctaatggctttcagaaaggtggttgccacattgctttgtaaactaacatgcggaaattttcactacagccttctctgttggcagtgctaaaaccaagcaaagaaagaaaaatgagagttcttggatcgcactgctagtcatttctcaagccaaaggagaaattgggttgttgcttggggaaaaaaatccatttatttctgaaattgacttcagacaatagggtaggaagagcggtggggaggacagcaaaactcttgaaagcatcacattcttgacgcccgcagtgactttagaggcctgagtgcagttctctgatttttcaaatgggagacggcccagggcagagagcagccttctcgaaggtacacacagccccacagcacaaggctttgaagtcaggaactcctgaactctaacaaaggctgcattccgctgtgcctcagtttcctcacctgtaaaatgagcgtactcaagcctgccttgcaggactgttgtaaggagtgagaaactgtgattagcacagggtacacagcaaagagctccactaataagaagcagagccaggactcagtctccctctggattcagccataaagttaaatttaaacttaaaattaaattcaagtgaaattgcccctgaagaaacacattcttatccagtagctcaaaggcctctaagaagttcccaggtcaagaaggtcttacttattacttccacagtcagcaatcagtcagctaagaaggaagatcaaatacccccaagtaaggcccccttcccccaaagtgccctgccctccttcaggattaattcctctggtcctgcccttgacacctttcactcactcaataaatgatagcagctaacattcagatgccacctgctgtgtgccactgtgttgagggctttatttaaatcactcatgtaatcctcactgcagtcctacggtgaggatatgttttaccactgccctcacttttccaatgagaaagctaaggcacctgctaggttcccacaggcacagcgacagagtgaggatttgaatccaaatccatggtttgtttctttgttattttatgttttggtttttgtttgtttgtttgtttgttttgagacagagtcgcactctctcgcctagactgcagtgcagtggcatgatctcggctcattgcaacctctgcctcccgagtttaagtgattctcctgcctcagcctcccaaatagttgggactataggcatgtgccaccatacccaactaatttttgtattttagtagagacaggatttcaccacgttggccaggctgggtctcgaattcctgacctcaagtgatccacctgcctcagcctcccaaagtgctgggattacaggtgtgagccaccatgcccggcccaaatccatggttttaaaccaccatgctctgctgcctcccacaggtaactaataataaatatgttcaagatatttttctaagagttttacatttatgtactttattttcctaataataacactaccagataagtagtagtatctatatttacaaataatgaaactgagacaccaagaagttaagaaatttgaccaagtggcacatccaggcttcgaacttagcattctggccccagacaccacaggcctagcctcttgcagtacaactgcttctcatcagcaaacacagtgcccatcatgggcaggtctgaacacaccgtcctagccctcgaatggctgacagtcaggttgaggaaataagactcattcgtgaaaatctgaatgagaaaaataaattgtgatacacacacaccgtggaatactacctagcaatgagaaggagaaaactatcaaaacagacagcatcatggatgaatcccaaaagcgttatgctgggtgaaggaagccaggcagaaaagaagtgcgtaggcatgattccatttatgtgaaattccagaaaatgtaaacgaatctatagtgacagaaagcagaccagtagttgtctagggttgagggatatatttaaaagggcataagctaacctttgggggatggaaattcattatcttggttatgtcaatggttttataggtgtgtacatatgtcaaaacctatcaaattgtacactttaaatatgtgctgtttgtggcatgtaaattatatctcaataaagctatttgtaaaaataaaaaataaaagagcagtaagagtgcaaaaggagagtccactaagattgggcactccagagagtctcacaagggtgcacctatgaagcacaggaagacttgggcaaaggggaaaggaggaggaattccaggtgggaaacagctaacaaaggcacagacgaaggaacactcccgcagtgcccggcatcacaggtgaggcaggtggctgaagacaatggaggaggccctgcctcacagagaagagctaaataaagacaaccctggcgacagcatgcaggacggaaaagggaaggactaggaataaaaaccagaaaagacacagcggctgccactccagctgggaaggtggagggaggggcccagggcgctggcctcggagggctggggcagggggtcgaattggcagacatgaggggatgcggaaggagagagtcatgttctgtatatgtttcagtgttcttttttctctccttttaaatgcagacctcagatatttaaactcaagaataaatcacacaattttccaactatcctgagaatgggtaacacacaacagatgaccaaaagcaggtgtccaacctcctccgctggggattttcatttcccaggaagcttaaggcctgcccaaggcagggaaaagaataaaaataaaaaatttaaaaaacaagctaaggccaagcttctaaaagcaaccgtagtggctctccaggcctggccaggctatgcagcaacgcggccggcagatggcactgctgcacaagcccaggccaactgcacgcaggcagttgcaatcgccaggttccagggcccaggcgtgactatcaccaggccagaaccggtatgagagccagcaggagttaaagtctgaatgaaggtgacaaagatcggcctgcagagaataaggtgggaaaactgacattttcaaggcccaaggtcaaagaaggacacaagcaattcatcatgcaccacccaccaccagccaatgtgatgggggatgcaaatgaaatgcaaacactgagcccagctagggacagcagagactaagggagagggaaggaggctacgggccagagcttctgggccatggacaaggttcctgctaaacttgtgcctgtcactacagcacccaccaccaccagcagctccactgagccagggacagcctgtgcaggctcttggtcccttctgatcctactccaaagactcacctctttagactctgttttgtaaaataaacaagagctatgaaaactagtgaatattttgctcttccgaaattactacaatagttttataccctagtttatttcccttaataaaaggttttctgggctttatttttcagtttaaaaaaaaaagtttctttaatggaaatgttcttcacattaggtttttattctttctctgctttgaaagtcaaagttgaaaatgcacgtggctggatatgatgtttgttttcattcatttaaactgtattttctgaaatcactaaaagtggctgtgttgttttcaaagttttcaattaactaattttattttacctgattttaaaatatatttataagacggtttctacatccaaaatatttggatggaaactttatacaacttgaatgcatattctaatgtgttggactgaagatgaggcgggcagtgaaaggggaaaatagcaccagagaggagaagcaaaggataggggtttggagacactaagataaagttcacagtcttcctgctctcaggaccttgcagacatttgacactcatgagccagaaatgctgcaaacttgagctcacttctcatcacagaacgccaaggaaaagatcatttctgtctccttctgagagcaagcattttgccactactagtaaaaccggtctgaaattaccacaggtttctagccccatatgtaaattggtccacatcattcaagccctgcaggagctcaggagctatacaaatcaaggagaggaatataaggttttgtcaactcatttagggaatatcacagaacaggcaattacttaacttggcaagttgaaatatggcagtagagtaggactttagctcatctattccacggtgaggacaaattggatccactaggacaaagcccaacaactaaactagagcagatgagatcactataagtgactataagtaatagccctaatggatacccatgctccaatgaacatgagttagcccagagttcagctcacagttccagtgaggtcaatggcagggctaggacactataggatgactgatgctatgaatataaatcccagctttatcacctcatgccattgagcctcagtctcatccattcaataggatgtgcgattatgaccctacagagctttggggagaatcatataaaatggtccctatcctggcttataacatcagggacagaatagtgtagttactgaaatgttgttttcactattctgcaggctggttagctacatttaccatgagttctcctattcgtggttgaacatagtggtaagtcactctacttggtccacttagcaagaatggtcctccttggcgatgaagacattaggtcttgagtgcagtccatgatcacaaaacacattctcctttcctagaagccaaatatgcttctatctctaccacggtctgtagtatcactgtcaaggatgaaggacagggccactgcacacattcacatgtacacgttcacatgtgcacagacacacactgccccagatcctacaaatatacacggggtcaactttgaagagagatgacagccattttaggccaagacggaggagtctggtaaatatgctttcaaaatacactcaataactcccaaagagctaaaaaaaaaaaaaaaaaaaaaaaaatttgatgactcagtgactcccaagcaaatcagcccaaaaaagatgcagcaaaagggccatttcatatagtggaaagagccagatctttggagtcacatagagcttcaaattctgagatcaactccattacttataaattgtttccatgggtaacttactgagctctttaggtcttagtttcttcataggatttttgtatttatgagtgacacaggatacaataatgtattctgtggaatcccagtcccaagggattctcacacacacacacacacacacacacacacacacacacacatgcacacacacgctccatgatcaaataagtttgagaaacaaaaactctcttaaatatctgcaaggtacagtagtatattaaaaagactaaagagttctgcaataaagaagcctgtttaactatggttagctggtgttctttaaactcacttgaccacaagtaactgttaataccctgcaaaatacacctttgaaaaacactgagataatgaatatattgtgtttagcacaatcaaggtacataatctctcttaacaatggcagacattatgacacaaaatattcttttccctttccctcctggatttctgtatcattctgcttaaatgactataatcataaagacaatagtaataacaatcataataataatgtggtaacaacactttgatgtttaatcccacagataatacatgacagatgcaggatttgaaccaagagctatctgaatgcaaggccattacacaatactgcctccctatccctaatgatccccgtaagagtcaaccctgctgccacagttggaagaggccaatcactggtgaacatatctcccttttgacccaagagggaagcagccccatgggaagtgaaaggcccaggctcctacctggtgctggactccatcctcaccaatgcactgagtgcaggcctcttcagggacacagctgccttccaacatgactttatctggagggcagaaacagccttcggagggatggtccccacaggagctcacgttgccatcacagtgccggggacagccatgctcacagtggttgtagaccagagatggtgggcatgacatagctgtagacagagaaggaggtcacttgcaaaggcccacaccagccagagtgaaatgggcacagctgattcaacatggttaatcatcagacaaacttgccagggcagagacggctattttccaccaatcttcatcctccccaccttccatagaaacagaactttaggctgggcatatgaccaccagaatgaggactatatttcccaacctttcttgcagctaagtgtagtcacatgactagttctgcccaatgaactgtaaaagaaagtatagtatcccatggcagcttccaggagtccattttaaaagacagctatgcatgctccttgtccctcttccctccttccctcagcttcctccttggagcatgaatgtgatggctagaactccatcttagaccatgaagaaaaagaccacacccaactgagggcagagcaaggaactagaatccagtttgaggcccagaatcagctggagccaccgcctccgatcagttgtatgacagaaaattttaattctctgctactagcagccaaatctagtcctaacaaatgttgtgaacctgtgtgtccttagtaggttttgttgtccttttttgaatacatatgtcttttatgcttgaaaagcatctttaaattaggaatacacagcttagaactgccttgggagagaagctacaaggtgattcatttccctcgttctgattcgctcaacaacttcctcacatcctcaaggcaccaaggcaggcaggtgatggacgaagtttccaaggatttggagcaccaaagatttccctctgtgtgcacagtaaataaccaggaggtacacaaagaaatcagtatgcagagaaagtgcttccagtaacttagaaactaacatttgccccttgatttgcaggctgattgggaggaggcagtatcatccacatggcctcagaaaatcagagccctaaggaacctacaggttatctaggccaactatctcattctaggatgcagaaactgaggtccagaaagactaagagaacagtccatccaccagctgagctgggactaggatgcccaagtcctccagacccagctcagagctgctgacagttccatgatgataaactctgaggctctaacaggcatgtacatattgatttccctcaaaaaaatagtcgaggattatatttgatgactgagggtttcaagttcagtattcttttcactccagcacccctgagggacaggagccatatctgattcatttcagtttcccctgtactttaaataaatgccaagtccaggtagggaagctgaccttggggaggggctgtctgcactagcaatcctgcagtgtttataactgagaagactcttggcaaccaatgattctacttgcacttcaaaatcctgctcaggcatggactacactgtaagcgtgtgctaaagcttggtggaatttcaaattcaatgtgactggttacacagccctttacagatgcctatatgtgtctaacacattaaaatcgcatttgtctgaactatagaaatactaatggaaaggaccatgcattaatttacataaaaattctacatgcagagtgtatgtgtgtatatatatacatatatatgtgtgtgtgtgtgtatatatatatatacacacacacacacacatatacatatatgtatatgtatatatatatcttccatcttatttgatcctaactggaattccaggtcatacgaaatacagggattttcatccttattagccagataaagaatctggggcacagagaggctgagcaagcccagttagctggtctccaggattttcagaggtaacttggagactcaccacagaaatcaggtgtcctccagtcaacgcagaccccgttggtccgacagaggtgggcataagaggcgatcacctcacacacttgctcctggtggcaactgtcctgctggcagatggcatagaatgtggctggagccaggaccttgtggcattcagcaaacagtggtaagaggaggacctggcagtgggagctgtcggggacaagacactgctcctccaggatgggctggcacgtctgccctggccgctgcacagtccattcctgaacaagtgttttccagtctgtggtgactgtgccatccctcagcatgaagtcattggctccgttctcatcacagatccctagagaaacaaacaaacaaaaaaaagataaactgagtggccctgggtacaaaaacattgatgccagagacaggccattcttgatcctcaccagaatctgaccctcgctactagaccctgaaatataagcatccaagagcctcagagtagagcaagtaaggtttataaatgtatagcagggggagaagaggagttgagaaaatgttcttaccacacagaccatacgtctttgaagcaaaagtcttggggctgagctgcagttggaactcattgttttgtggagtgaatgtgaagatgtgaccaaggtgattgaatctgacctcatgcatgatggcaccataaacgttgacttccatgttcccacccacgtaaggaacagagaccagtctcccattcaccgtcacctgcacaaagaagaaagagctcatccgtagtcctagcaatgaggaatcctaggtttttagggaagttaccgagagttcctgcacattcatcacactcaactgcaacatcagccacaaaccttgatatttgtcggcagctcttctaagataaagaagagcttgactagaaaacagagcttgactttacagagcttgaccagaaaacaggctgttgtaatactgtacgggtggccatgcaccaagaacctaaaagcctggagattaaaaggaaccttgagtctatgtgactcaacagggaagggcaatgcctttaagacaggctgggaaagtcgccttattgccaactcatcagagcagtgtctccaagagcatctagcagctgtgtccaaccctttgaatgcaaggacatttttgcttctctgtggtggtggatatcagaaaattatgcccagaccttttttttagctcatcagctatcgttagtgttaatgcattgtatgtgtggcccaagacaattcctcttccagtgtggcccagggaagccaaaaggttggacactggtgttttaatgggaccactttaagtcttctttgtgtgtatgtgtgccactagacgctctttcttgggcagccccaccatatatcatatcaaacacattaaaatgtactcacattccacaatgaatataattttgctgtaaaatttttggaaggattttttatcattttgattttttaatttttggctatgagttactcacttgatatatgactaagatttttctgcaattattgttcaaattcaggaattcttgcgaagtgagaaaatctagcttacaagttgttttcacacaatgaaatatttatgatttctacacgaacaagtaaagaagttggcatagtgtaaccttttgtaagcatttaatcaatcatttatatatatatatatcagttttgcagttttcttttcaaattttggagcctgacgttttatgtaggccttaaatattttcaaaagacctaatttaggccataaatgtttccctttggaaagcttacagggtttaggcattggactcataataccttccgagtaaacaatcctgatgccaatcccaattctccaccagtgccagaaactggcactaaattcacaattttatgctatctaaaagtgattccatcttgcaaatctgagcccggaacaacatgaaatcacgccaagacaaggggatggcaataaacccctctaagaaagtggtactcctctcctccacttaagcagaaggcagagctcctaacaagagcatcaactaaaagcaactgccaccaggtccaggtggttttcctgacattctattgccttaccacggatccacagaaagtacttctcacctccatgtcactgtgcagctcgacggagagggcactgtgcttcacctcgatggatttcatgcagccctgccttgctccagggctgcaggcaccattatggagaatcacctccaggtcctgctccttgttttgaaataggacataagaacagctgccagtcagcttgaaattctgcccatcaaaggtcacgatgtgccgagtggagctgcctgtgcacacacctggacagagagaagcagaggatggatgcgacgttatccaaacccccatgcctactacatgcagacaggcaggtgtgaccaagttgcacacagataaatacagtagagaacggaacaggccctttgaggtcatatagaacaatttcctcctttttttacagattaggaaactggggctctgagaggtagagaggtttaggtaagtaacacttggccattaaatattttcctgttacataaaatgtggcaaattatagaaccacacttctaaaaaatttaaatgtacagtgtgaataatccattctacagggatgccttggcccagaaaacaaagttaagttccaggggtgttatgactcgtggaaattaagaaaagctaagcaagctatgagctcatgatctcattgtaaagaaaattcacctaaagacacgtgtcctttcagctgccaagtgactaaggtaatggtacaagtgaccatgttgacttaatcccttaagagatcgcacaggagaaatatttccagagccaaaaaaaaaaaaaaaaaaaaaatggttgagtctcaatgctccctcatttgaccctgagtcattcacataattggcaaattctcaagattcctattaaaacactattggtgaatactgatcattttgcacctacataagatgatttggtaaaaatcctcacattgaaggcaccaccaccataaatgatttgaaagctaatcttggacctaagtaaagttggagataagctttccagacaaaccacgaccacatctacaatggcaggtgaatacatgcccaagagctgagacacagattcggtggagcagggaggccccactaacatccctcactcatagtcaagcctgagccaacctctccctatgggggttactgtcaagcagcacaaccactgacaaatgatgggtctggaagcaccatcagagctaagcagcctccccagaagttctactaaaaatcccctatgtccttgagcagtcagtcatttccaagtgacagtactgaatactactggcttactaacatccatgctgcaagtgatccccaacacgcagctgttgatattgtcacgtcaaggagtcagcccaactgccataaggatggaataaatcacaaggcaaagaaatggtcttagctcacacaaggcaagttagtgagaatggctctgcccaccctaagatgaactgtgactgtgtaatgggtactttacagccagagaaactaggggttggtttctgtttcacttgcttgcactgtgaccttggatcagttacttaactttactgatcctctcctatctcctctgcataataggcctataatcgataccttttagtattcttgtgagaattagttgcaatatagatgaaatgcctacctaatagtgcatgactcacatgtgcatgtttaacaaacagatctccaaatctttatgaataagacacaaaataaattcaatagtttgtaaattgctgtattgtaggtatagtaaaacttgaggtccttccatctccagaataccaaattacctcccaacaaaccatcacattatactccagtttagtgattagttttaatgagccatatatattaacacattccaatgttcaggacatagagaaagttaggccgaaccaattaaaaattaatacattagagttatataacaaaatgttactgcacagttataaaatattatcacagagtaaagtatatcactcataaatatctcctgaaatcattttatctcatctctctccttttcttcaacatcttcttactcattatctttccaagtgacaatacaaatatttgtgattgaatattatattaaaacttttggctgattgtcaaaatgtaatgatatcagatactaaagtgaattgttagcaaaacacaaatgttcaaaaagacgtccaggtagccaaagtgggccctaatacttcagctattaatattgtcaagttggccgggcacagtggctcatacctgtaatctcagcactttggaaggccgaggcgggcggatcacaaggtcaggagatcgagaccatcctggctaacatggtgaaaccccaactctactaaaaatacaaaaaattagccaggcatggtggcgggcacctgtagtcccagctactcgggaggctgaggcaggagactggcgtgaactcgggaggcagagcttgcagtgagccgagactccgagactccgtcaaaaaaaaaaaaaaaaaaaaaaatatatatatatatatatatatatatatggtcaagtcaaggagccagccccaacggtcatgagaataaaataaactacaaggcaaataaatatgtagggagatatatatcctctgaacacagtgaagaacaataagaacaaattaaattactatgaaaaaagcatgctttcagcataagtagaaaacaagaaaatacccaaattttatttatttttatttttatttttattttttttccaagagaagtgtcactcttgtcaccaaggccagagtgcaatggcgcgatcttggctcactgcaacctccgcctccccgggttcaggcgattctcctgcctcagcctcccaagtagctaggattacaggcatgcgccaccacacctggctaacttttgtatttttagtggagacagagtttcaccatgttggccaggctggtctcgaactcctgacctcgtgatctgccttgacctcccaaagtgctgggattacaggcgtgagccactgcacccagccaaaaacatccaaactttaaaatagccgtaaataaagtaaaagagaaaaaacaccaaatcccacccagcaaaaatccctcatcctctaactgttagcctttgtcatgagcaaggacaatccaaggagaactgaaaagaagagagaagagagtgggcagcaagcctaaaatttctctataaccaccactaccaccagaaagaaaagcctatcctaagggcaaaaatattttgaagtatcccaacagaccagagcaggtgctaaaaacacacgcaatatttggtgacaacctgaaaagcatagtttcaaggggactgggagcaaaaaaaaatggaaaggtgcttggaaagtgactggagacataaaaataaagcaaacgggaaagtcagggtccagaaaaacctgaaaaatcagaggccacacaatccttcaggatccacatgtacacacatacacacacacacacacacacacacacacacacaccactaaggaaatgacttttctatactaatagaaaggagggtcactgaaccagaaatcttgtaaaacccaaaattcacaaaatgaacagattaagcaagtccataaaagcttcttcaaaagatcagaaaatgagaaccaacactcctcatctaatgaaaattccacaaaaaggaaaaaacaaaaaacaaaatgttatgacatagaagaaaactatgagacaatactcaaactgaattaaatatactcaaacatctgcacaaatgaaaaccaccttgaatcagaatttcaaaaactaagaagagaaatgaacaaagacaagaataaataaaaatagaactcagtgaacttggtgggggtgggtaataaaagtgcaaagtcaactctgaaataaagactaaattataagtacccaaggaagatgacatcaaaataaaaatttaataaagagcatcagagaaaagcaaaaaaaaaccaatcaagagaatgaaaatgagttaatgaagaaagtataaaggtcaaagagacagtaatgaaaatgtaagacaggagaaaaaatggactcttaaaagagaaaacaaaacaatggaacagaactaacacttaaagaatataactcatgaaaacattctggaaatcaaaaaagaaccaaatctatgtatgggagtcatgtgccagatgtccggaaaaattaacccaaaacagtcaactctgagacatattacagtacactattagacttcaaacataaagaaaaaattttccaggccttcaggcaaaaagatcaaataatttacaaggacaaaagaattatattggtatcagaattttcaaaagcaatatacaaagcaaggcaacaatggagcagcatttttcagaaatttagtgaaagaaaatgtgaatcaagaattctgtattcagccaaggtgcccttctagcatcaatgctatagaaaaacagttttaaatacataggaattaatggaattctgtacacataagcccttcttaagatatctactagagacccaggcgcggtggctcacgcctggaatcccagaactttgggaggccgaggcaggcggatcacgaggtcaggtgatggagaccatcccggctaacacggtgaaaccccgtctctacaaaaaaaaaaatacgaaaaattagccaggcgtggtggcgggcgcctgtagtcccagctactcgggaggctgaggcaggagaatggcgtgaacccgggaggcggagcttgcagtgagccgagatcgcgcctctgcactccagcctgagccagagcgagactctgtctcaaaaaaaaaaaaaaaaaaaaaagaaatctactagagaacatttcctccaactaagagatgactaggaaatgttaacaaaacaactaaagtgagcatttttatttatatagtcatagatctaaaactaaaacgaagaatggaagactaatgtgcaaatgttatatgctgtgacagtagaaataatagaactcgacaatgggaggagaggggagggaacaagaaaagttagaataacctcattgattgttggatagccacaggtagaagttaaagaatgctattaaaaactgaaaaactgattaatgaatgcttaaatttaaaaatatgggcctgaaggcattttagaaaggtataacttcaaaggtaatgacaggaacaaaagcataaaccttcctagacaccttaacgtatcaccacatttataaatgaaaaatatataacaaacaattataaaatataatgacgaaagaagatcaaacacaagatggcaataaatgagaatgggcttaacttgtctactaaaacaaaaaggttttcaattcggctcaaaggcaagacccaactattgctatataactaaaattcagaaaggctaaagtaaagggacagacaaaggatatcaaacaataagaaaacagggatggagattttgatatcagacaaagtaaaattctagccaaaaaaaagattaaatgtgactaataagagcattctgaacagtataattcacaatgaagccataacagctgtgaatatctatgcaccagacaacatcttcatagagcaaaaactataggagaagcaaggagacattggtagacaaactaataacaggatacttttagacatccctttcagaaccagatagataaaatggggaaaaggtaagtaagactatagaagacaaacattaaaatcaaaatatgtagttctcatggaggggtgacaggaagagagcgagggatctcatactctacaccctgataatagagaatacaccttcacaaaaactgatcatgtattagatcacgaagaaaataacggtaacttccacaaagtagaactattacagatactctcgtcagagtatagtaaaattaaaaattttttaattattgtttaaaaagatctttacacttggaaatttttttaatttatgatataaatcctgggtgaaagggacaataaaaacagatagtacagaatttctttagaaaataatgataataaatacactacatatcagactcattgggatacatataaagtgatcctaggaaaattcataacagtaaacatttctgtcaataaaaataaaacaatgaaaatgaatgaaattcccagttccaattaaatagaaaagcacaaaaggtaaactaaaagaaaattcaaggaaagaagtcataaaatagcaaggataaaagcagaaatcaataaagtagagaatataaaaacagtaaacataataaataaattgaaatcttgatttttaaaaaagtccagaaagacaaatcatgagttaatttgatcaagaaaaaagataatagacatgtatataaattaacaaatgacaaaagaaaatcgctatttaaaaagaatttttgatattataaaagattactgtgaaaattttacttgtaccctagagtatatacaaacaataaacaaaattttagtttaaaaaaaagactactttcaagacctctatacaataaatgtgaaaatctagatgaaatggataaatttctaggaaaatggagattaacaaaattaactcctgtagataaaagacaaatcttaagcacaccaatttacatggaagaattagagtaagttagtaggaattaaagaaagttactccaccaaaaaaaagaaacaaaaaacaaaataccaaccccaaatgatttcacaaggaaattttcctaaacttccaaagacctgatagtccgatgctccataaattgttccagagtactgaaaaggagagaaaacttcttaaagcttttaatgaaaccagttttaacaccaatatctaaaccagatcaagacagtattcccccaccacaaaaaaaaacaaaaaacctacagggtgggagacggggaagatggtggagtaagaagcaccaaatatctgtctccccacctagacaacaatagcattggcagaatctgtctcatgtagtaaatcaacagaaactatccctgagaaagaccagatggtagactcactaaagaaagactttaaaacaactgtcttaaaaattatcaaagagctaaaagaagatgtagacaaaatcaagaaaatgatgtatgaaccgaatggaaatttcaataaagaaattgaaatcataaaaaggaaccaaaaaagttctggatattattgtaatcttagtttgtgacttcactttttgttttctacatgatttaagaggctaatgcattaaaatttatatacgtctatgtttttgaacacacaatgtataaagatgtaatgtttatgacatcaataactgaaagagtgtggggatagagctgtataagagcagagttttgtctgttaccaaagttgagctggtataaattcaaagtacagcattataactttaggatgttaaatgtaatccccatggtaaccataaagaaaatagttatagaatatacacaaaagaaaggaaacgggagttaaaatgtttcactacaaaaaaaaaaaaatcaaccaaacacaaaggatgacaacatggatgaaccttgaagacattatgctaagcagaataagccagtcgcaataggaaaaatgcataattccactcaaaagaggtgcttagagtagtctcattcagagagacagaaagcaaaatggttgttgccaggggctggaggaagggggaaatggggtatcattgtctaatgaataaagcatttcagtttcacaagatgaaagaagttctggcaatggatggtggtgatggttgcacaacaatgtggattttctttctctctctttttttttttttttttttttgagacggagtctcgctctgttgcccaggctggagtgcagtggcaagatctcggctcactacaagctccacctcccgggttcacgccattctcctgcctcagcctcccgagtaactggaactacaggcgcccgccaccacgcccggctaattttttgtatttttagtagagacggggtttcaccgtgtgttagccaggctggtctcaatctcctgacctcattcatgataatgtcactggatatatacttaaaaatagttaaaaggataaattttatgttatatgtatattactgaaaatttaaataagtagtgttaaaattgctgaccaaaaatacttatgaatgtcaaaaccaacgtactaaataaaatattaccaaacagaatccaacaccacattatgaaaataacaaagcatagccaagtgggatcaacattaggaaattccttcaaataatataccatatcaatatatttaaagaaaaaaaatcaagagattatctccatagatgctgaaaaagccttcaccaacaccaaaattccacaatcactcttgacaaaaaaacactcaaaaatgagaattgagggatactttcataatataaaatacatgatatgtgtgtgcacgtgtgtgtgtgcgtgtgtgtgtgtgcaagatactccactgctattcaacattgtactaaaaagtttattaatggaattatacaagagaaattaattggaggcacaaaaattgacaaaaaagaaaaacaattctatttgcaaatgacaaaccatcatacccagaaaaccctagagaatccatgataaaactaactcaataataaaagaattcagtaaagctataggatatggaattaacatatacagatatatataggttatatatagatatatagatatatagatgttatatatattgatatcaataccctttatatacacaaataataagtagttaaagaacataatggagaagaaaaaagtctcatttacaattgcaacaaggaagattcaatacttggaataaacttagcaagaaatatgcaaaacccaaatgaataaacctgaaaacacttctagaagacagacaagtcagcttgaataagtggacaaacttgttcttggataggatgatttaacatcataaaaatgccagttctcccaaagttaatgtataaatttaatgcaattccaataaaaataccaacaaactttttatggaggtaaacaagttgacactaaagtctatacagaaaaaacaaacataaaagaatagccaggaaaacaatttagaataaagctatgtggaggtactagtgctaccagacaataaaacataccataaagcctttaatgacaaaatattagaggtatttcctcttaattaagacagtgtggtaattaagacaatgtggttttggtatatgaatagcttacaacaagtggaatcagaaaaaaagttcagaaataagcccatgcacatatgaaaatttggtttatgattattattcttatctcacaccactggggcaaatattaacatgtcaataaatagtactgcaacctatatcacagataatgagctaatagttcaaatatttaaaataacgaataagattaaaacccaatggaaagtagaaataatgaacaaatttagggaagaaaatagacatccagcttcaagaagcccaaaagactccaactagaatgaatttaaagaagtccgctacaacatatattataatcaatttgtcaaaagtcaaagacaaaaacagaattttgaaagcagcaagagaaaagcaacttttcatataaaagggggccacaatgagactatcaacaaatttctcagcagaaaccttgcaggccagaagggagatggatgatctattcaaaagaaaacaacgggcagccaagaatactctgtctagcaaaactgtctttcaaaaatagaggggaaataaagactttctcatgtgcacaaaagctgaaagagttcatcaccactatacctgccttataagaaatgctaaagggagtccatcatgttgaaataaaagaatgctaggcagcaacatgaaaacatatgaaaggtaaaattcctggtaaaggtaaatatataaacaaatatagaatattttaatactataatgacaatgtgtaaatctttgaattctggtatagtacttaaaagacaaacttataaaaataactatcactataaaaatcagttaatgaatacacaacattaaaaaatataatttgtgacatcaataatataaagtgggggagaggcagtaaaagagtagagttttcgtgagcaattgaaattaagttgttataagcttagaatagactgttataagtataggctgttttatgtaagcttcatggtaaccacaaagaaaatatctatagaagatacacaaaaggaaatgaggaaggagtcaaatctcatcattacccaaaaaaatcaatgaaacacaaagaagggcagtaagagtagaaaagagggacaaaaaagctacaagactgactgaaaataattacaaaatggcaacagtaagtccttccctatccatagttactttaagtataagtagaataaactctccaatcaaaagctatgaagtggctgaaatgaatttttaaaaataaaataaaacagccaggtgcggtggctcatgtctgtgatcccagcactttgggaggctgaggtaggcagatcatgagagatcaggagatcgagaccatcctggctaacatggtgaaaccccgtctctactaaaaatacaaaaaattagccaggcatggtggcacgtgcttgtagttccagctacttaggaggctgagggaggagaatcacttgaacccgggaggcagaggttgcagtgagccgagatcgagccattgcactccagcctgggcaacagagcaagactccatctaaataaattaagtaaataaataaataaaatataaaacaagatccaactatgtgctgtctacaagagagagactcactttagatttaagaatgcacataggtttaaagtgagaagatggaaaaagatatttcatgccaatgttaactaaaagacagcacaggtagccatacttagagaaattaaacttcaagtcaaagatggtcacaagagacaaaaaaacggacattatatagtgataaatgcatcaattcaccaggaagatataagtacattgcacccaacattaaagcacacaaatataagaagcaaatattgacagaagtgatgataaatatagaacaacataatagtgagagattttaatatctcactttcaataatggataaaaaatccagatagaagatcaataaggaaacagagaactcaaacaacactatggcccaagtggacctatcaaacaaatacagaacattctacccaacaacagcaaattatacattcttctcaaacacacatagaacagtctccagaatagctcacatgctagcccacgaaacaaatcttaacaaatttaaggaggctaaaatcataccaagtatcttttctgacaacagaataaaatgagacattgctaagagaaataatttcagaaagttctcaaatatgtggaaattaaaaaacactcttgaacaaccaatgagtcaaagaagaaatcaaaagaaaaatcagaaaatattttgagaaaaacaaaaactaaagcacaacatagcaaagcttatgggaaacagcaaaagcaataaaaggaaagtttacagcagtaaatgtctacagtaagaaagatctcaaacaaataacctaattttacaatgtaagaactagaaaatgaataaactaagccgtaagttagcagaaggaaggaaataataaagatttgaggaaaaataaatgaaatatagaatacaaaatatcaataaaacttagaattggttttttaaaggtcaacaaaattaacaaagctttagctagattaaccaagacaaaaagagaagactcaaataaataaaatcagaaatagaagagcttacattacaattgatagcgcagaaataaaaaggttagtaagagactactatgaacaactacacactaacaaattggataacctaaagaaatgaataaatccctgaaacatacaacctaccaagcctgaatgatgaataaacagaaaatctgaacagccccatcattagtaaggagatgaaattaataatcataatctctcaataaataagagctcagatgctttcactggataattctaccaaagatttaaagaagaattaatgccaatctttctcacactcttccaaaacactgaagtgggaaacctactttatgaagccagaattaccctgataccaaagtcaaagactttacattaaaaaaaaactacaagtcaatattcctgatgaacacagatgcaaaaattctcaacaaaatgacagcaaactgaattaaacagcacaatcaaaggataatacactctgacggagtgggatttatccctcagataggagaatggctcaacgtctaaaaatcaataaaggtgatacatagcattaacagaacaaaggataaaaatcatactatcatgtcaacagatacagataaagcatttgtcataattcaaacaccatttcatgattaaaacattcaacaaactaagaatagaagaaaattacctcaacaaaataaaggccattaatgaaaataccacagctaacatcacaccgaatagtgcaaaactaaaagcttttcctctaatcaggaagacggcaaggatgcccactctcaccacttctattcaacatagtacgagaagtcttagctagagcaatgaatcaagaagatatgaacatcacccaaatcaaaaaagaagtaaaattatctccatttgcagatgacatgatcatatgcatagaaaactctaaagatttcaccaaaaatttgttagcaaattcagcgaagttaaaacaaattcagttgcagaatacaaaatcaacatacaaaaccatttgtttcaatacactaacaatgaacctgtccacatgaaaaagaatgaaattggacccttaccttatatcatacacaaagttaacccaaaatcaaacttaaacactgatacgtaaaacctgaaattataaaactcctaaaagaaaacacaagaactttgcaacattggtcttggcgacgatttcttggatatcattgccaaaaacaaggcaacaaaagcaaaaatagacaagtgggactacatcaaaccaaaaagcttctgtgcagccaaagaaacaatcaacagaataaaaaggcagcctacagaatggaagaaaatatttgcaaaccatacatttgataaagggttaatatccaaaatatattaggaactcatacaactcaatagcaaaaaaaaaaaaaaatgcaaataacccaatttaaaaatgagcaaaggacttgaaaagacattcctccaaagagacatccaaaaactcaattatatgaaaaaatatccaacattactgatcatcagggaaatgcaaatcaaaaccataatgaggtatcacctcatacgtgctagaatggccattatcaaacacacacacacacacacacacacacacacacacacacaccaggaaataccacgtgttaacaagaatgtgaagaaattgaaacccttgtgcattgatggtaggaatgtaaagtggtgtcgcgactacagaaaacagtaagaaggttcctcaaaaaattaaaactagtattagcatatgacccagtaatcccacttctgggtattcatccaaaagcattgaaatcaggatctcaaaaaggtacttatacacttccacattcactgcaacattattcacaatagccaagagttagaaataatccaaatgcacatcagtggacaaatggataaagaaaatgtggtatatacatgcaatggaatactattcagtctttagaaagaaggaaatcctttcatatgccacaacatagatgaacttggaggatgttaagctaagtgaaatgagccagtcacagaaggataactactgcatgaatccacttacaggaggtatctaaaatcgtcaaattcatagaagcaaaaagcagaatggtggttgcgggggctaggggaaggggaaaatgggaagttgctgttcagtgggcatagtttcagtcacacaaaacaaaaacttctagagatctgctgtacaacaacttgcaaatagctaacaatatggtattgtacactggaaaatttattaatagggtagatctcatgtgtttcttatcacaacttttctaatgggaaaatggggaaaggcatgagcagaaaattcacaaaattagaccaaaaaatggcaattaaacatatgataaaatgtttaacctcactcatcattagagaaatgaatttcaagtacactgagatactatttctttcctgaaaagtaagaaatttgcaaaaaaaataaataaaaactgtaacaacacactcagcaaggccgtggagatgcatgcactctcatacctcgctgatcgaaaaccaaactgatggacattccagttttgcacaaccacatctcacctgttagaggagaatctgggaatgtctaaggggaacttcatatgcacttatcttttgacccaagaatctcacttctaggaatctaccctgaagacacacctccaaccatatgaaaattcgttcgtatgttcaggtttactcattgcagcattgcttgtcattacaaaacactggaaacagcctaaacgcacatccatagaagaacagttgggtaacctatggtacacagtgaagtattaggaagctctctttgaaatgacatcgagtaatttccaggatatgcttttaatcacaaaaggcaaagctctttgtacagaggaaagctgaccataccctccttcccagaggcaggcagcctaaattggaactgggaggtgttttaactctaatcaaattcaaagttttgattattacgcaagagtgggtatctagttatcaactgagactttgtcttctgacaaagtaactatagaattctttatgaataaacagaagaaacctaaagtctggtggagttttcacctagaccaagagggaaatttatctcactaaataaattctaaagggggaatgagctataaatacagttttgattgcatcccaccagttatgcctgttcagcataaaggttacaatccactgctgagtcatggtcaccataagcagtcattgctcccaaacatgagacagaaggctaacccagcccatggatgacatgctctccacaagtgtacatgagatggactttaaatatttcctcctcttaatccaggccgccttggtgatgtactgttgctataggtgtggttggagagttttctggaagcgtctctctcactgctatacttccactgctataccctgaatacacagattcctaaaggttgacttgccaacagccaagctgagcattgacctcagaaaagcaattcttccttccagttatgcataatctggggaagtgccttccaaagacagagaaagagggcagtgatccctgagactggctgcatgcatgtccaaagagcacaggaggaaaggaaggtgagtgaaggtagcactgtgcatgtggtgatgagggaaagggtacttctgggctggtgggtgcctgctctacttttctgcacagccaagctaaaagcactgcccctttgacgctgccctggctggagaagcaaaggactcacaggggcaggtccagcggcagccacaggtctcttccactttaacaggggactggctgttagggcacgaaggcctcagcccccggtcacagttgacccgatgactcttcagcaaggtctggccatctggctggcaagtcacggtgtggcactggtctggcaaggtccagacgtccccgggctgcagaagaaaacagcagattcaggcagggaataagatgaggtactccaactctaagcccatctgccagacaactgacccctagaattgaacacaggcctacacagcaaggaggccccctgtacatgagacaggaagcaaaacacaagatgtacagatggacccgcaaaaacaagataatagtaaaaggaagcactggactaagaccaaaggaggaaaaattaaccagtgggaacaagagccccaaacacatctctaacctttctttcaaagtcaacagaaaggaacttaccctcttctcattcccatcctcatccatgcaaatcctaacaaatcctgcaacagacacaaataagaccttagttcccatctttcacccagaaattctgaaccattcacaatgtctgcttaagcaacctggtctagtttttgaagtcaactcaactctgaaaagaatctgaacaaggttaacagtggagacatagggacatgaggctgaggtggtcatcctgtggttcttcagacatgctctgcagttattaataattatgatgccaacaacagcgataatatggcaataactacagcttacgctgtcattatcttggttcacatgtagatcacgccagggatggggaaggtggggagatgaagcaagatcctggaaacctgaaagagatctacttgaagattcctaccaggagagctgccatctctctgtacagctaatgttattagctataagtcaaaacttgcatagagttattgccctttaagggcaaacttgcattgacttattcccccgaaggacagtagctttatgcaggttttgacttacatctagtaacgggaaaatatacaaacccaggcccccgccacaaaaaaagcgtgtgtgtgtgtgtgtgtgtatttttttttttttttgagatggagtctcactctgttgcccaggctggagtacagtggcgcgatctcggctcactgcaagctctgcctcccgggttcacaccattctcctgcctcagcctcccaagtagctggtactacaggtgcccgccaccacgcccggctaattttttgtatttttagtagagacagggtttcactgtgttagccaagatggtctcgatctcctgacctcatgatccgcccgcctcggcctcccaaagtgctgggattacagacgtgagccactgcacctggccaaaagcatattttttaagtttctaacctaaaatcaacttaaactatggtactttgatatgagtctccgtgttatcgtatttctaaagccctttatacccatgttgagagttagtctaggcccatggggaagaagactatacctacggaacgctggggttccttgcttatgtcttctgattcttttgtccaagatccctctacacaaataagcttaggctctctctgccaagttcacatggacaattagagtggaaataggaccatacacagaaagctttctgctggccccatgggggcttgtggtatacacctcccatgaacagaaacttaaaggtcctggtctatataataatcttcattcaaggccaaatcttatgcatgggcaccctggggtctcttgaatactatttttgtttctttggcgggtttattttggaacttttttttgagggaagtaagaaaggtattataagactcaccagagcacagtttgtggaggaaggaattgcccaaggtgaccatggtagggaggtcttcgattcgctggagcttcaccacgttggagtcgcctgctgggcctgccaagatccgtagctgggctgcatcgtagcgatctccaattccaatagggaacactgtcactcctagagttagcaaagagacaagaaaggatctgtgggcaagaaggctcaaaatggactggcctgacgttatatccagcatctgaatacagcctcatgttttccaggctggtcacatacatcagccctatgaggaagatgttcagtcaacagatattaatgagctgctactctgtgtcaggtactattgtaagcaataggggtacagcagtgaaccaagcacataaagtccctccctgtcccccgtcctcatggagagatagacaacaaacacacaaacaaagtaaatatatagaatttcagatgtggataaatgcttaggaaaaaaacaaaatgagataagggggatgagaatgcccagggctgaggtgtgggttatcgttgcatatatggcagttggagaagcatttggtgaaaagatggcatctgagcagaaacctgatgtaaggatggaaggagccaagaggatgtctgagggagggacatcccaagcagagagaagagtgagtgcaaaggccccagagcagaaatgtgactgcatgctcccgggggctggggagagagggacaagcaagagagggaaagggcatggatcaggcaatgctccattggccacagtaagggctcaccatgttctgtgaatgaaacaaagccagccaagactacagagcagagggacaggagctgattttgatattaaagggccactgcagctgctgtgctgagaatgatctgcaggggacaaaggtggaagctggggttccagttagacagctatttcaatagtccaggtgagagatgatggggactcggattgaggtgaccctagtggacatggtgtggggaggtgtgactctcgaagtattttgaagatggagctatagtttgttcgtggcttgcatggaggtatcagggaaaaggaagaagaatcaaggatgctgagctttttgaactgaacaactggaaggttggaattgccattttctaagataagaaagacagatgtgaaaatcaggagtttagttttgcctattagagcatgcaaactgagttgaggtgaggctggagatacgaatttcaaagtcaaagatgtataaatgtatttagacccatgacactgaactagaccaccaagggggtatatgtaagaagagaagagaaaatatcacagggctgagcccagagaatgtgcatgctcatttacacatgagaaaccgaggctttggacggttaaatgacttgctctggatcatatctgcttcaagaccacaactgctttctttcccagtgaaaatctttctttggattcttgatactgaaggagaaaaaatctccatcctgaaattcctcaattcagctctccagaaagttctaggaatttgcaatgtgcttcaggttggaacggattttctattagcagcttttcagctcttgtaagttcgttatattatccaaatatatatcctttcccttttagtgtcctttaccctaaaatcatagatttcataaacatgtcacattcattcactcaacaaacgttaaatggtcacctattttgtgcatcatacacagatgatacaaaaataagcaagatcttcccttgccttcaaagaactcccagttttttgcaaggaatagatatgttacaaatacaatacaatacaatacgatttgcacattttgagtagctcatatgtgacatagagaacggagcaaataacttcctcaggaagaacatcaggaagacagcagagaaaagacagggttctgacagcactcctaggcagggttctgaaagatgaacagttctccaggtggccacgaggggactcaatgtcactccactcacccagaccttcttcagctgggaggtggtccctagactctaccacctgtcccagctcacatcctgttgatattaagaacatgataagcacatgttcttatggagcacaaggctggacatctggatccttccctttcctacagcatgatcctttgtctctcatccatcaaccctgccaagcccattacctggtaccaggaaaggactctaaatacatgaaagcccccattggttctcaaggccctacaatgaatcactctggcctcagacatgacattttagtaagagaccacgaatcctactttagaaagaaagggcatagaggtatgatcactcctggacacaaagggaaaatgtggagaaattaaagattataattagttataaagatataggatcaatacacactttttattgtttggtttcctaatcacatcgtggttggataatttcctgctgtttgaaaccaggacagaggttggtattgagcatatttaatatcagccacaacatccaaaagtaaccccagcccacttttaatcctctatcatttctgaagtctcgctctcctgaattgaggactgtacaccagattcttactgttggacctggcggcatcagctgctgcatccactgaatccacagagacgtccgtgaccaggatgaccaccgcctttgaggctcccggcctggcaccatgcatttctgaagtcaagtatcgcacagcaaagcccaaggcatcccctgaggatggagaacagatcacgccaagtcagtactgactgcggctcgacaccctgtcttaacggtggatccttaagtcacttaaaagctgaatgattcagaaactccaaggaacacccagttgagatctggagagacgtggaagagcatctagcccctcactttccaggagaagaaactaaggccaaggagcaaagtgactggccgaggtcacacagtcacttatgccaaaaataagaaccagaatgcagcttctgcatccagcctgtggcaccaacgttaccgatttggctggggcctccctcccgctgcatgacgtccacaaggctcagcaaatgggctttctccgggaccacgttccatggcacgtcaatggtggtgatgcttccatactgcagcactgacacctgagtgagacgaggccctaaacggaacgagaaaatgcggattattttgaatcaagtagagccacaaaaagagcctcttcgtcacctgctgcttcaggtgcctcgctcacccacctatattggcttttgaaatgaaagccttggcgaaactcttcatttcatcaaaataagaagctgggaaactggaggagccatccaggagaaggatcacgtccaggggctggctgcagtctgcaaagacaaccaggaaggtgagcacacaggtgccagcagggacaatggccaccaggcctacaacctgacatccaataggatctgcagggcgtgctgaccacgtggcaccaccaaggggggcggggggtgccttcgtgagtacaagggcaatgtgggccagggaggaggggatggggagatggagttcctgggtccggactacctcagatttagagacactgagaagactccaattctacccaaaggaagtttaaatgtctacaaataaaagcagcaggcataggcttcctcggtaagaaggggccaccattcttctagaaatgagtaaaatactggcctggcaatacaaggagactgcaaaaggaaatggagcggcagcccctccctggacaatgagctgctgtgtcctcagatcttgcagggcaggtgaacatactgtgattcttccagctataaatgcctagtgctcctgttagtgtctgagcacatctgagatttgatgaaatgatgtaattgttgttttcctcagcagaaatattacaagaatttaaataaatctatggccgtgaataaaaacaaaaacaaagaaacaaaagtactgacaagtgtgtgactcaaaagatactaaaagaaggcttattattctgggatggtcccaaacacaccgaataaagatgttcaggaactaggaatggattagacgccagtgtcagtaaaaggtagtagtaacagcagtgggagcaagcatttttttttgagcacttgtcatgtgccagatactattttaagcaagtaggtgctattattatccccattttatagatgaggatacacaaagatgtgtatcctttgtatagatgatatacaaagaggttaagtatttgcctcatcctttgtatagacgatatacaaagaggttaagtatttgcccaaaattacccagctagcaagtagcagagataagattcaaactaaggcagtctgactccagtgtctgaagactgcacctgctacctgacacctgacatcctggtcttgccctgaagaatgtcagctactcggaataatttcacccacccagtgtggtcaaaatgaagcttatcatcaccacctttaacagaggttaccttgaaggcagagggtggaattgggtggggaagaggctgtgtgataaagtaagacttgcattttttttttttttttactccttattggcattgtttaaatgttaacaataggcttccattacctttgaatttatagaagcacacacaataagaaaagatcttcccccgaaaaaggatcacagtttgtctccctgccagggaggtgaggaaacacaggccctttgaaggcaagtttcaaccaaggccacacagaccagggaagccaggattagaacccgagtcgtatcttggcagatgcatgtagcaccaaggccatgccagccctcgcccagccctcccacctgcacacaaggtgccagcataccaggtgcaggggagagggtggggatctgcagcccctctccggagcagcacctctgcagcaccaggtcaggagcctctcgggggagcgtctcaaagtcctggatgaggataggggcattgggccagccaatcctctccagctcctgcacgttggcattagggcccactccaatgggcaccacctggatgtctccaggcagcctcttgatctcatcagaggcaggatttccggtgaccatgtagaccaggttgggcgcctgctcccggtcaccctggctgaccaagaagctgtggtcagagaggtaccgcagggccagcccagtgttggtcctgttgccgccctggtagcggatctctcgcacccgctgcaggatgtcccctttggactgtgcctcgctgaaggggtactccacagtcaccatgtaggagtactgcagcaccgtgacgtggatgctgtcctggcccacatccatccgctgaatcacctcctccatgaactccttgctcctgttgaagtcggcttcaccaattttgtccgatccttccaggacgaacgccacatccagaaccatggagttcctcttgggccccagggtcgaaacccccaagagccccgggcccacagtgacttgtgccatgtcggggggcagagtaggaggaggggcttcaggggcaaggtcacagaggtagctaacgatctcgtccctttgctgctccagctcatccacactgctcagcacgaaggccttgttctcaggggcctgcttctcgatgaggcggatctgcttgaggttggcatggggcccaatgcccaccgggatcacaatgaccttcttcttcttcaggccctggacgtagcggacaaagttccgggacatccgttggggctcctggctggccatcaggagcagggtgatgcgggaggcttcagggcggtcgatcttgctgaagatttggaacagtgtgtatttcaagacctcgctggtggaggccacctggctgcccgcatacttcacctggctggcaatgcgccgcagctctgacggtcgcttccggtccttgagcccgatgtaggcgtgggagccgtcgtggtactccaccacggccacgcggacccacttctgggagatgcgcagccgctccatcatgtccaccacaaaggccttcagcacttcaaactcagcctcggacagcctggaggagccatccagcaggaagaccaggtccagtagcctgctgcagtagaaatcgtgcaacggcggttccgagatgtcctccacatacagagtggtggggctcaccggggcatctgtgggaggcaccaccaggcctcccggctcctggcaggcttcacaggtgaggttgacaacatcacagtggctgcagaaaagagcgaagaaattaaaatggttcaggaagaacctgtggacacttctgagccctacagtgtacaatgacttccatattcccacagaatctcctctgttccacctgaacttgagatcccatggaccattccacatccaagtgagatgtcattgtttaacatctgtccccaaatagcatgccccccaccttcaaaacacacacatagccgacttcctttgattctagaaaccaaagctttagcccatcctaggatatgaaaaaatatactcgttgttctaggccatccacacaaccactcaaagctgatttcttttcaacctacatctttagcaacatgaatacttaattataatccaagccttcttacaagtgtctccaagaacaaatgttactaaaatgtagacgctaacctgtgtttgtacatgttctgttgaagataaatgctttacagtacatattctaacagaatgtaaattgcatgagttttaaaacatgtttgatatgttgggccctaacgaagagagaaaaaattggagcaaaaacattgtagaaagatgaataaagattcaaaaccccagctttatctagcagaacaaattatttgggagtagcagacaggggtctccacggtgtcaggcctaggaaaagacattcactcattcctccagcagacatagggtgagcacctctcatgtgccaggtactggccaggctctgtgcccagccccaagcacacaccacaagtctgtagtagagcagtggccccccacacacaaattcctacactaccatgccaaatttccaggctctgctggtaacatcacctttttgccagtgtcccggaaagtggcacggcctgccagcccacaggtgaaatcaagtgaccgtgtggtggagaccaatatgggccaggaccatctcctctttggactctcagccttggaggcacctggccttcagcactcccagtaaagctgacaaggcggcagcgccctgagcctgggaagtgtccccctgcggcttgataccaggtgatgccaccagcctgctgtgggacttctgtccacacactgcttgcagcttcagcgtgcaccgtggcagctgcccctgcccgtgtgccagcaaaggaggtggggagagggctcgaagctctcatgcccttttggcacagaaccccaagccagcatcagaatcacccagtcctttgctccctacagtctctgtttcagcataaagagtgtgcgcaggtagagtcttactaggaagttaattcctccttcccgtgatccacaagatttattgcttcaatccttggttaacagtgcatgagtgacatactttctagtttcctgtgtttgctagaaaactcaccccaggcagtgttcattcttgtttgtacagatggtggcggcaggatctgactctagcagctgtgaccatagcccctccccagcgaatttacgttctcaagtttaagctcccagaaggcttgattagtgtcagggagtggtgttgaatagatctggattttaataaatgctccctacttatgagcaggacttcagagggctcagagctcaccctgaggactccttctcacctccccaaaggccagtttcccagaggcaagtccagtgagaagccagggtgagagcaacgagcaccttccctccccattatgacagccacaccctgccaccttgactatggcccccacgacgttcatgttacctgagggccctgggttccatctcactttcctctcctgagtccccacctccagtatatggacacctgtgctcagactagtcatgacctacaaggacaataagtgaccatacccccaccttcagtgagaaaagcaaaaacctgttaggacttaaaaacctattaagagcaaaaacactgtggaggaatatatgtggaggaagcagtctagtccatccctaaagaaaaagaagcaaaccctaggaacaaacaaaacaataaactacattaaataatgaattaaataaataaacaaataaaataaactcagtctctcaactcatgtggctaggactttttacccaaaacctagtctctaagctggcccctggagaagcaataagattcatcacttcaaacaacccaggaatctgttttaccaaatctggcagtgctcagggtcactgggattcaaggtgactttctttcctgaggcaaaacgccggccagccacctcacacactggacagtcttcagggtcaacgcaggtctgcaaaagctcatccaggattttccctgcaaaagaaagctctcattaggaaccaaaacgctcccctttcccacgaggaagcctcatttttaactaaaagggaggagccaactcctcctcctgccctagaagccaactcctcctgcctgcactcccaggggtcaccccatcactcaaggagcatctctcctgcttgtgccttgattgatccctctgcaaaactgggagcggggattccttcaccctacctcacctccccaagcctcaggacaaatgaaatcttatctccggggctctttctgctcttctgaataacaccttcagtaactctagagctgtgctgtaccataggatcgtcacaaactgcgtgtggctatttacgttaaattaagtaaaattcaataaaattcaaaacttcagttcctcagacacactcgtcacagttacattcaatacaacattcccccactgcagaaagttctatcggcaggggctgctttaggtgagaatcccataaataggcacagaaaagcattttggaggagctcgacttgagaaaaatcacgactgtcctgactctgatgaaagaacccacggaacctgcagcagccttgcaggtcagagataggacgtggcaggtggaggctgagatgaagcaagacctagaagcacctttccatccatccctatcccatcccaccagcctgacccccagggatagaggcctcacctggagggcagtgggcatggcagccctccacacactgcacagggcaggccagtggctcagggtgctgacacgtgacttgacaggcaggtgcacagctgttatagcgccactcacactcatacccgttctcccggagattcctctcctcgcagctctgggctgtgtagacaggagacaaggctgtggccacaacaggcaaagcctccaggactgcagacccatgtggtgatggcctgcgccatctggagataatgttggggaactaggggactatgggcgtcaccaatattagagacttctggattgttgaagcacctaaaccagaatctattggttctgaattcatttctttttttaatttttgtacagatggggtcttgctatgttgcccaggctggtcttgaactcctgggctcaaggaatcctctggcctcagcctcccaaaacacagggattacaggtatgagtcactgtgcccggcccagttttctacataaaaacattaagttgcttctgtccaaagaagcaagattctatagacatgaatgtatgagttgatcactcatattggcaaatataatcacgcctaattaaagacataaatcgacttccttcttttcatcagtattccctcttctcccctgccagaatctctccagaagaaaagtctccacatgttcatgccttgaatccatgtcccacctcacccgtaatataaacttcttacacagccaatgtcttaaccctccttagcccttggccatccagtccctactaacactctgtcttctctcgcccatgaagatatccccctgcactcacaaggtcttcaagcatagacacatgggaagaagggagggcatctgagaacatgagggcgtcagtactcacggcacaatgtggccgtcctccaggtcaccaccttgccatgctgggcacacacgtgggcataggcagcaatggtgtcgcagaagcaggcgcagtccccaatggactcacaggagcaggtgtcgtaaatgcagacatccagatatggctcggggtccacctgcaaaggcagcctcaggtggcccaggcctatggccaggtgtcaggaactctggctcttagtctgggtgcaaatgttctgatggtcaatttaaggataagggggtccaggtagaaggagaaatgtagctcaatggtctcaaagagggaatgagtgggaaggcaagattcttagtttctaatctgcattccagcaagaagagttgaataatgcagtgctgctggccttctgcagaacacaatgagcctgaggattttccagaagaacattccctctgtccctctgcctacctccctgctcagccacccatctgtcctcacaacccactcttagcctcatgagcatgtgggtgcttttacaaaaacacaaacacacatatgtgctggtcactgtctttctttgcctcaattcagcaaagagaatggggaaatacatcaggccctgcagctgcctcactgcagtgctatggggcaggtatgcaggacaatagggcctagactctgattccaaatccagttcaaccagttccaacccttcctcatccccaaaacacgcctctaaacacactggactttttcagggcagttatgacagaaaatgaattcagacactgagtgggtcattgtttccaagacgttccaacagtctcaatgtccccaactcctcccctgtcctcactcttccaactcagatgcccaggatttccaccaaaccagggaatgtaagtatcctttggagtcctcagagaccgaaaatcactgcatagatagaaagagaattgagatccatgttttcaaccagtctctcccacattggtggtgttacacagcagcatgtatgtgtgcatggctgtgtgtgtacacagacttctgtagtcacatatgtccatgtacaagcccatgtccacatgtgtgtacacacatacatgcagcagataagagacaactgcactatggtcgggcatggtggctcacacctgtaatcccagcactttgggaggccgaggtgggtagatcacctgagtcaggagttcaaggccagcctgaccaacatggtgaaaccttgactctactaaaaatacaaaaattagctgggcgtggtggcaggtgcctgtaatcccaggtactcgggaggttgaggcaggagaatcgcttgagcccaggaggcagaggctgcactaagccaagatcatgccattgcactccagcctgggtgacagagcgagactctgtctcaaaaaaaaaaaaaaaagagagagacaactgcacttaaccttgcggaattcctccttgtcattagagatgaagacacaaaaataagtcataatacgaggactcaaaatcaccaaaattaaggccagaaaagaatttctgtgagacaagaaatgggcaccaaggggttttagggggtgggagaggaaggtcttttggtctggacaaatgcagcagtgacaggaaaaggaaatctctggctctggtgttgaaaacaagatacttcaataagagaacaaatcctaagactggggctgaaagagaagcattggcacatgccaaggggagttacttctcatgcagaaggaaatgttttgccaggcattgcttcccctagaaactgttgattttactttttgtttcccagattgaaagccaagaaaaaaagccgaagtggtgtcttggtgcagatcatgtcaagacacgagggtagtgtccacgttagaaggtcacactctgtgtccataccaccaggccaagccttgggaccgtctgcttcccactaccctcaaggtcctcaccagcttgttgcagtcctggaagacgtcactggtaaggattctacaggaggaatccaccatcgtctgcttcatgatgttgttatggcaggtggcaggggatgagtccagaggcacctgggaaccaggcaagagataggccagccgtcagctggtcaaactggggttattcagcccagaaggatccaagagaccctccttcccaccctgcagccacctggaggtcataccacccacaaccccccttccagcccccatgacaatggggacagagggacattccaggaagcaagctctagggctctgtccacacagagacccagacgtacttttctggtgtcagcacactgcgagctcactttccaggagttcccaaagtccacagggtcttcctccacttggaggttgctgctggtgaggtcattgttctggatgccatcaaaattcccacacaggccacacactttctccttgagagacaagttgagggatgagcaccgtcaagcccaggagcatgctctccggctcaggggaaaggggaacattcctggcggcaatggaggcagagggcattcgaggaagaggaggaggagcgggacagagactcagaggaggcccgaggtgagcagcaaagccttgccattgccaagacccattcctgagcttccttgctggccccattttatttaaagctatggaaacagagaggcaacatgcccatgtcacatagtcagccaagggcagaggtgggaatcaggcagccttggccctgagatcactggtgggaactatcactgtccccaacaagcatagaagcagagagaggagccaggtacactgctccaccaatggaggtgtaggggtccaaggagggaaagttatagaactgcctgcctctgggaaggtgagtccccttgcctggagaagtgcagcctgttcagagtaggctgggcagaattctgctctctcataaatgtaatcaggaagatatgtctcacctgtctccatgttcacccatcatggagtgcaacatgcaacaagttctgaaaaagtagttacgaatgagtgagaaacaagtgaaaactacacaaagaggagggataagttctagtgttcggtagcaccacagggtgactataattatcaacagtttattgtatattttcaagtagctggaagagcagactttgaatgttcccaacacaaagaaatggtaaatgtttgagggaacagatatagtaactaccctgatttgatcactacacactgtatacatgtactgaaatatcacactgtcaccagtaaatacatacagttaaatgtcaactaaaaataataataaaacaaaaaaactacagaaaaaactggaaatatttggcctggagaagaaaaggtgctatacttttacaatatacttagagccctgatgttgagacaaagagaaaaaatgtattctatcttgcttcaataagctgcattcagcttggtacaaggggtgtaagtcaccaggaaacatagaggaagaatgttctcactgttgggcaaaaggccaacgatcttcccatggcctagtagcccccatggtatggctactgcccctccctgccctcgtgaactaccattacccccaagtccctcctctgtagccacactgacctccttgtacaacggctgcagacacctaccaccttaaggcctcggcacgtgcttgttccgtctgcctaaactctctcccctagatactggcatgactcattccctcccttccccaaagattctgctcttacatcccctcttcacagggctcatcagcccaaactatctatagtaacattcctgctaggatataatctgcaccaggattatggaaggcaaaacagtggctcccatgggatgaagagtttaacctggattatctgtgtgggctgaatgtcatcacagggtctgatcagagggaggcaggagggtcagagttcaaaaggtgctgtgacagacagaagcagaaaaggagaaaaaaagtagaagatgctacattgccagcgttgaatatggaggatggggccacaagccaagaatgcaggcagcctccggaatgtaaaaaaggcaagaaaagggacctctctcagagcctctaagatgaatgcagccctgcccaccaattttagctttccaacctctagaaccatatgataataaatgtgttgttttaagctatcaagtttttggtgatttgttatagcagcaataaaaaaacaaatacatggaagacacatacacacacacacacacacacacacacacacacacccctaaacaaaaaaacttttttcccctgctgtatccacagcgcctaggaccacgtttgacacatacaggaactcagtatttgttgaataaatgaatgaatgaattgttaatgctttctgggactgagatgggctgccacagagaagtgagggcagtgctgcctcactggcttgtacaagctgaaaatggatggtgttatcagggatgctgtggaggccattcctgcctgactaaaccagtggctagagtagccagagccacttgtcacatacatgccacttaaagaaatcatgcaagttccaacaaactgttggaccctaaatagtggaaccgttctcaaaagttggttattagcaattttacaaatagctctcaaaacatgctggcccatgactcaatgataaggaaacaccctagaatagtctgcagtgttatactaatattgtgcatgattggtttgctgctgtaggttaagaaacctaaagaaaagttgatattgtcattcagattcaagaaatacagagaacaccacaaagatactcctcaagaagagcaaccccaagacacataattgtcagatttaccaggttgaaatgaaggaaaaagtgttaagggcagccagagagaaatgtcgagttactcacaaagggaagcccatcagactaatagcagatctcttggcagaaaccctacaagccagaagagagggggggaccaatattcaacattcttaaagaaaagaattttcaacttagaatttcatatccacccaaactaagcttcataagtgaaagagaaataaaatcctttacagacaagcaaatgctgagagattttgtcaccaccaggcctgccttacaagagctcctgaaggaagcactaaacatggaaagaaacaaccagtaccagccactgcaaaaacatgccaaattgtaaagaccatcgatgctacgaagaaacggtatcaattaatgggcaaaataaccagcgaacatcataatgacaggatcaaattcacacatgacaatattaaccttaaatgtaaatgggctaaatgccccaattaaaaggcacagactggccaattggataaagagtcaagacccatcagtgtgctgtattcaggagacccatctcacgtgcagagacatacataggctcaaaataaagggagggaggaaggtctaccaagcaaatggaaggcaaaaaaaaaaaagcaggggttgcaatcctagtatctgataaaacagtctttgaaccaacaaagatcaaaagaaggccattacataatggtaaagggatcaattcaacaagaagagctaactatcctaaatatatatgcacccaacacaggagcacctggattcataaagcaagtccttagagacctacgatcagggagcagaaaacactccaaaggccaagtccccaacaagatgaagcaagaaagccactgacctggtatgtctgcttcaggaccacggagatgctcaggtggcggtcccagaccacggagagggctttgcccagcagcagaatgatgtaccggccagactccaccacctcaaagtgagtctcatccttcatgggcctcttcacattcacctggaggaagacaaagcaagaaatccaggaggatgaagggcaggctcgacagccagatcctccctccactctacacctgcccatctgtcttcagtgcccacgagtgcaggcactgccacccctccaggaccccacctgccactgcacccctgcagggccagccccacgccaggacatgtctgtgaccatctcaccaccaccactctccaggcatccatgaccaagagacggtaacagaggtagcagcaaaatcatgattatgaaattaaagtactatgaaaccaatgagcaggtattttattgacaattagtcattaaatatagtggtctcctagataggttttcaacatggcaatgattttaagcatctctagttgattgtttaaaaatctattcctctataaaaataagcagtagactctcacctttcttgtatcccaccacctccccctccccagagccactgtcatcaggagacagagctgaagaaaaaggaaactgaggtgctcagtgctagtgctgggaatcacacactgcaggttcaagaagggctctgacctgagcctctgacttagcccaatccctgccagtgctgtaccctggaggaccatttcagcatgtgtggcggactctccaattcatcagactgaggctgaggctgagaactgccatcatccctttgcagaggtcctctcattagtaacatatcacatgcagtgcagagctaatcacatgtgcaaatctatccctcacatgtctgcacacctcctgttcagcatcatcaccgccactctgccctaaatagagctgttctttgaaatgcagttgacactgctgactcacagttaatacgttatgcttgctaagcagttttcttccataatggtgaagaattcacctcccatcccctgctgtcaatggtgggtatttggaagaaggcagagctgcaggctgaggccatgggagaaaatgaagataccaggacaagtttgtgcccagagcctgggtctccacagcactccacatagtcaaagcagcggatccaaaactgtggcctggggatgacctgcaactttaaacacaggttcctgggccccacccagacctactgagtcagaatctcagcatggagttctaggagccacattttaaacaagatctcctaagggagtcttgtgtacacttatgagaactactttttaagttcttagtacacaggggactgaattagtttactcctcttttgagctcctttctggccaggcatggtggctcatgcctgtaatctcagcactttgggaggccaaggcaggtagatcacctggggtctggagttcgagaccagcctggccaacatggcgaaatcctatctctactaaaaatacaagaaattagccgggcacggtggtgtacacctgtagtcccagctactaaggaggctgatgcaggagaatcgtttgaaccctagaggtggaggttgcagtgagcagagagatcacaccactacactccagcctaggcaaaagagcgagactccatctcaaaaaaataaagtatttatctgaaaagaacagaaaaacatatgaaacatatcccataacatcatcacttcatacacacacacacacacaaagaaacccggctaccctccagtccccaccctactctagaggtgagcactggttcttcccacgtttgtgcagacacatgtgcacatccttcacacacactctgcactgtcgctaaaatgggattgtgtcatccctattgttctgccacttgttcttctcataaaataatacgtcacggtcagttgcaatagctctgcctcatcctctttaatggctgtgcgttattccattcacacgagctctaaatgaatgcttggaaaatgttcctattaagtggcagaagcacaaagcgggacatgagggtggagatgaggctgcacttacctccccgtcaaacagctcaatctctcctccctccaccaggatggtgacccgtttcttgcatttcactgaggggtggctgcatcccttattccccactaggatccgaaaggtcccagggttactgccgcagtaatcctggggaaagaggagtgccaggagaagaccattatccccactggctctcaccagaccagaagattggcatctcttcatcacaggcctttgagtacgtgtcacaggatcttgccacgtccatggctgcgcatatgtgcctctgtgtgtgtctgggggacgggggatatgcccaggtgaatgccctcaggtgtgtcaacctcgcccacgacagatgagccaggtgcctgcagtgagtggggtgggggtggggaaggagggggagggaaggaaggtgacatgtggcctgcttcgatggatgcatcaggctcaaaggccttgcctagagcccattagagtcccactggagccttgcctagagtcccacccaggtaactgggacagtttgaccacagggcactttgtggctctgaattctggttgaatccctctgcactgctggcccagaaatggaaccaaagatggtttgacacagctccatgggtcctgagctaccaagtcgagatgagtagagaggataaggagctctggtccttgttggtcaattgcatagaaaattaagcaaaaggggacacattcctggcaaatgcctcccccatggtggctattattgtgatgtgatgaaaaagaaagataaaatgttcaacttagaaaaacagagtgtgtcgcttgaacccgggaggcggaggctgcagtgagccgagatcgcaccactgcactccagcctggtgacagagcgagactccatctcaaaaaaaaaaaagaaaagaaaagaaaaaagaggccgggcatggtggcccacgcctgtaatcccagcactttgggaggctgaggcgggcggatcacgaggtcaggagatcgagaccagcctggttaacacggtgaaaccccgtctctactaaaatacaaaaaattagccgggcgtggtggcgggcgcctgtagtcccagctactagggaggccgaggcaggagaatggcatgaatcgaggaggcggagcttgcagtgagccgagatcgcaccactgcactccagcctgggtgacagagcgagactctgtctcaaaaaaaaaaagaaaaaataaaaacaaggtgtgaatcttgattctgccacttattggtaacactgagcaaaccacttacctttctgacacacacacccacacacacacatacacccaaatacacacaggcacatgcatacactcaaacacacatatacatacatctatgtactcatacacacactcacacacgtgctcacacatacacagatgcacacacatacacccatgtactcatacacacacacacgcatacacatacatacacacacgtagccatacacacacacgcgctcacgcatacacacacatacacccatgtactcatacacagtcacacacacgcacatgcatacacccacacacacgcacatgcatacacccacacagacatgctcatgcatacacacatgcacacatacatgcatacatatgtccatacaacacacacaatctgacctctaagattccattcaacttaatggaattgtcaggttaaatggctttgtgttaggtcgatgcatggcgaaggttaaaagaggaaacaagggtgtaggtgttttatttgtccttatcttcagctgagatttctgaaagagggagttaggtcttgatgatactccccaaaggaggatggcagaaaggggaggggccccaggacaatgcatcagaagacaacagaaccagctgtaggaaaggaaaacaagccacacacaaggggcaccgtttggagggggagtctttaaaactggtccacttgggaaagctggcctgggcagggaagggctgggagcagcagatgctgaccagctgtctggtccttgctgcactgaattaattttttcctggatgttcagatttgaaatgggctgggcagttgttctgcaaagctggtgtcgccctctcttttgctgctgaggctgggaaacttccatatagaatctctgggaaagctctaaaggggcgcatatccccccggatcataggttccctgcctggtctgcatgccctgtgtccccagcacactgcctgcctctctgggccagcccgggtgtgaggtggggactgaggaggctgctgttggctccgccccatgcccagcatgctctacacgagtggtcggtccacagtcacccacgctgcctgactcaccagctcctgcaactcagcctctggggctggggctcctatgggtttgtggtcttccattcagaccacaccaagctcccgcccctcctcctcctgggaatggagacagagggaccatatttgttcaaagcttcacagagtacagtgcctcagctctggtgagaaaagcactcatacttccttgcttacacagttgatgtcaaccagaaagagaaacttacaagaatccacgcagtggggagtgggaggcagaggggctgctgcccacactcaccgtgaggattcctggatcgctctcatctgctgggcaggatgactttcctgtgtcccatcctcccactcctcccattctgaattgtaccaagttagacattaaaatggcggagaattccacaaagccatatcgtgggaagcaaactccaggggtcatttcaaccatccccctgtccagggccactgcacaacacctgcagactgtgcactgcccagggtgctggaagggaggctgagcgggactgacttcccagcccaacccactccctaagctatgcaccctgactgaggctgtgtctaccagaaggaacagatgactttttctaattccacatctgtgctaatgtggactagcagtagcctttctcccacaccaatcctcaacaacaaacaagcttctgtctcgttttataagtccccaggtgagcagagggaaaatggacaaccactttgagcttcaaatcccctaccgcttcaggcacttctgtgaaggactgggaagtactccagtagaaaccagaccccagagttgtttctgcagacagatccacagaacccaacctgaggccacacctcccacccctcctagaaagaaacagcaccctctccccatctccccacctctcacctgcaccagaacgtactggcactccccggggaacaggtatttgagcccgtcgaaggtgaggtagtgggccatgccgatcgtggagcacgtggcatcacacacatggtctgtgcagttccacttccggtcctgacagacactaggagcagtcatggcagagatgacaagttgggcaccttgggtttgaggggcccatctgggccatggaggcaatgaaggaacacagaatactctgggtgcctcccaaccctccaggaagcccaaggaagttgaggacctgtagcgtggagtgtggacttcataggcccagtatggtgcccagcaggagacagggaagcctagtggctgtccctaaaagggggaaactgaggcaaagaagggaaggggttgtccaaagtgagccaggcagccagggaggaggcccggatgctctttaggcctcctgttatgaattcgctcagcctcaccctgaaagccacatctacctgagattggccacagggtgtctgtaaaacagacacactgatgttgaaagcctgaggctaatgggaaaaacaagacagaacagtgggaaagcccagagtatagaaaagagtgatgaagtacgcacttctgccaggagcagtcctgtgtgcatagctacacgttaagatgtatgtagctacatgttaaaatctatagtgatctgcccactgccacgtgtccctccctgccaccacccgtaaccagagctgacatcaagaagcccacttgtgcgtcagaggtggtaagctcagacctcaagcccaagagacagccctctctacctctgtccagtaggcctctttccaaggctgtgcacagccaccaagtcaaaggcagggtgaatgagcagggtgaggggttacgtgcaggatggccaaggaaaagggagaaggcaaccagccaccctcacctcaaaccacgccactgcaagcacactcacgaagtgctcatgggcagtgtaaggcctgcaacgaaaggaccctccagaccccgtgcccactggcagcttggcccaaatgcaatgactggtggggcgaggtccctgtcttccctggggcccatctccctgaacagaaatacaagctgagcattcctaatccaaaactctgaagtccaaaatgttctgaaacccaaaactttgagcaccaacatgacaccacatgggtggctgagagggtgacacctttactttctgatggttcaatgtacacaaaactttgtttcatgcacaaacattaaaaatactaaatacacattaaatacatatttaaaatgttgtataaacttaccctcaggcaacgtgtataaggtatatatgaaccataaataaatgtcatgtttagatttaggtcccatccctaagacacctcattatgtatatgcaaatatttcaaagtccaaaataatccaaaatccaaaacagttgtggtcccaagcatttcggataagggctactgtactaacctgttgaatagtgtctatgcaggatggacacaggtgatgaaaaagattctccccattttacagatggagaaacacaggcacggaggaaaggcagagagtaaccaggttcccacagggggctggaggcaagtgcggaaggtcctgtggccgcgtgcaccctcactccacccgcagggcctgggtccccggcgcagcccctcactgagcctcaccaagtgttgcagccaatcttcactgtttctccaggggcatactccttgccctgatggaagcagggacacctttccagggccacacatctgttctcatgccggacctaagagaaaagaatccaaaagtcctcagggccacagtgactgatctaaagccctcctccagcccgctccaggaagtgttgtctgagacttgagcctacgggtaagcccagcactgggactggcaccaggaccagggctgagccagggggacagcttccactgcaggccaagccaggacagggatcctatgcccaggccagggcttggcaaacatgggttcccatctacatggctcctccctgtcaactaaagacactgactgccctctgccctctcgtgccctgctggggcactgtaacctggacatttttgcaaaggtacttcaaaaaatcatgtccagaggccttgaaatgcacatattcttacacctagccatcccaaggaaaggatttctctgagggaaatagaattatggacaaagattgatggagaattatttatcattgcaaaaaaaaattggaaacacttaataggaaaatgactaaatccattgaggaatcaccaggcgccagtatcctatggtgctattacaatggtcctttggaagaatcttaaatgaagtgagaaatacttatgctgttaatttttaacacaggaagaaaaactgtatatacatatggttccaaatgtatatatatttcacaaaagactagaaggaaatacagaatctgcctccaggtggtgagctgggataggcgagtgggaggattttattttctttttcagttttaaaatttttttccaagtgttcttcaatgagcatgtattatgtttataattaaagaaaatgaacactatattgaataaaattaatatgtacttaacactctggaggtgagggccaaatattgggcataagtagaaatcgatcagaactagagtctgggggctggtccaagccacaggccccctcctgcccagtctcccgtatcccggttcactctccatggggtatgctctacttccccgtcgtcacccctcgggaaactactttcgtgagcatgttgtattcctccggtctgttggggctgagaaaataaaagaactaagaactaccagccccagaagagtcagccaaacccactctgagctcaacatgcagacacgcttctgtcccgactccaaggggcagccctgggtgcctgtcctggtgtggcctagccttgggggttctcaaagaggcctgggtcacccccaggtgaaggactgtggcaccttggctccagagctccctgcagggcgagaagctcctggtctgaacagttccagctccacgtgacccagtcactccccagacaagtctgagctcccaggcctggagctggacaaatccctgggaacagggcaatcttgggctgaacaaagggctttcaaggacccaggctagaatcgtatgtgagcatgtgtgtgttggggcggttggggggagggaaataggaagaatcctccactgcttaatgtcatcttcacccaacctcaggaggtgttcccgcatctctggaagcccagctgatgggtcaggatgacagtgcagggcataagatgcaggttgaccccactcttggtagctcttacctcccggaaccactgttcttgggagggaatgagcttaagcacccagtagggaagatggcaccttggtaggagctggcagggctgaaaaacctctctctagcagagcattcaaagcctctgtcacaattagggttcatgtccacatcgccccgtccagtgtcagctctgacttaagcctgaggcccaccacctagtggctgctataagaatgactgaggtatcccacggatgccttacagtcaacggaaaccagataatacgcctccttgtggcaaataccatgtgggacagaagtgcagggacggactccaggaaacagagccaggctccccttacctcagcagcacatgttgcccctcacccttgggcaggccgggctgggggctcccaggcctcttggtctgcatgctgcatgtttttacctctcgccatgatattcaacccatgggacaacccaccatgcctcctgtcacccaggtgtgggtctatggaagcccagccctcctccagcggacagaacactccagtcccagctcaggtgtgagataacaatgccatgactgcagccgccacctcctcctccttctgagcacccactgcaaaccacgtggctgctctctgccgactcgtgttagcaagaggaggttattaattcatggacagcaatattataataggaccttgatattaagtgaggactgctatgaaggccacagtggtgtggagttaggtcataagagagctggagaggagacaaaacataatcttcaatgagaggaaagggtttccaggacacagcatgagacttcctgacttgggagagaagagcaggtaacaatagcccagctaaaaacacccagagaatcccaaagtggcaaagacattcagggaggtggaaattcatggaggtagataggcctggaaataaaggggtaatttaggggatggattggacccagaggggagctgtgcagagaggcggggcaggccagcacaacagtccctggccaaattttgtggcaagtcacttaaacctcacagttaaaatgaagagaaccacctccgtctagtgtttgtcccttcgggacatcaaaaggctactaagataaagtctatgaatgtcccctgaagacttcagaagaaagcctggcaaaaatactcgtcccatcactcaccaactcatgacatcttcagtccgaaaggggtcaggctgagaacgtggtcctacgtgttggtccactccaagaaaattataaagtaggaaaatactggtcttgttacctttctctgaaaaggccccattgtccccaactctccatacatgaacaccatcgtgacccactctccagaatcttttttaccttccaactgcctctcgttcattctcctaccccatcagtactttcaggccaaagcagctgaactcagccagaagcttgcgaggaggagagtgatctgattaaagcactcctgctgagcgtgatgactcctcctatgaagacttatgaggttccgctttttttaaacctctcgcttgttaaccaaaatgaatttttgcttattatatttcagtaagcccgactgagtgacaaatcatggaccatgtaggagatatttctgaaacaggcccttctttggatcttttaaaatgtgcaacgcccacatgtgaggccgcctctggatgggcccttgaacccaagctctgaactttaagaagtggtgcccaactccttcagtcttcacatggggccagtgaggaaactggacatcctgggatcagggacataaccacacttctcgccaccaagaggctcctaataccagcagtttgggagatgtagctgctaggtttcaaacgggaagtcagcatctcccagacagaggcctaagtgtttcagattacaggagccctggtctcagagtcaggagaccagaatttccactatacaactatgaaggcttgacccggctctgttccctttctgtcctcagtctcctcccgtgtgatagaaggggctgacataatgggacctcagggtttcttcttctctgccctctacgatgctcccagagttacccttgccgccggactcaggaagggtgagcagggcagtgagttgtgctttgctgtcacctagtggtggtagcaggtaatattctaacttaaagagatggatgcttcaggcaagcatggctccaagaatttctgaactagagaaaaatacctgggagatcttccagcacaaccccctcattttatcgatccggcaggtctcagaaagtgaacactgggatctaaaaagatgctcctgtgtgtgctaattccctgcagcatctctgttcatggcaggattcaccgtttcccaccacgaacttactgtaatagttagtggtcattaaaccaccactcactaagcacctcccatgtgctcgctgctctcatctccagtcttcccaacagcctgcaagccagttttacagataagaaaattaagacgccaagatgttaagtgacttgccactcacttaagtagatgttaggaggcaggattcaaacctggaagtgtgaggttccgataccatgccgtttccaggcggtttctctgcccttcatttatcacggtgcggaccacttagcaaagggacccccatcctcctcattcccatgccaggagacctttgcacgatggcaggagcagatacagcctgcagcttgtggggtcaaccagaaaacctctgctctaagcaggtgccaggcctgggacaaaccagaaagagaggggttctttctctgcccccgccaatattttcaaacaggtgcttctgggcatacggtggacactgagaggcaccttagaggaggagagacaatcttcggctgagaacagggctgctcaaagtgcattccctgggccagggccagcctgtgaggacgcaagcacagaaactaagagaaagtgtttagaaaatcttagggaaatttggcagagtcatgttatgtctgttatatgtcataaaaagtgggaagtaagagtttagatttagggatcatgaaaaaaaggaaagaaaacattttttaaggccgggcatggtggctcacacctgtaatcccagcactttgggagacagaggtaggcagaccacctaaggtcaggagttcgagaccagcctggccaacacggcaaaaccccatctctactaaaaatacaaaaatcagctgggtgtggtcgtgtgcgcctgtaatcccagctactcagaaggctgaggcaggagaatcactagaacctgggaggtgggggttgcagtgagccgagaccatgccactgcactgcagcctgggtgacagagcaaaactccgtctcaaaaaaatttttaaaaaaaaaagaaatttttttttttgagacggagtctcgctctgtcgctcaggctggagtgcagtggtgcaatctcagctcactgcaacctccgcctcctgggttcacggcattctcctgcctcagcctcccaagtagctgggactacaggcgcccgccaccacgcccagctaattttttgtatttttagtagagacagcgtttcaccgtgttaccgggatggtctcgatctcctgacctcgtaatccgcccgcctcagcctcccaaagtgctgggattacaggcgtgagccactgcgcccagctgaaaatattttttagttgggtgggatcatattatttttgtcattgcttttgttttatttttatgagaattcatttttattgtatttacaaaagcatgggtccacagcaggctggaaatctaagaaaaagcatcctttacaggtctctcctatggacagcaggaagaactgatgggtgcagcctctgagacagccttggatagttacagaaacaacaatgaaagctattcctacacttctgtagaactctctggctttaaagtgctttcacacacatctccttggggcccacagccatgcatcatggaggcagaacaggaattcggtgtctacgtaacacatgaggtgactgggcttccggtaaagactgaaggattgcacaagagcatggagtgggaaagcagggaagcctggcctgacgggtctgccctctgcaccccattcctgctctttctgccccccgcagatctgcccccgggaaaaagccacttccctttcccctgtcaagtcctcagaagaatgcagaatccgtgaccccttccccaagcccttagtgacatcccacaaccctgccccttcacaagggacagactggacagaggaacaccccgagggatgatgtctgcaccatcagatgggcccaaacagggtgtttccaggcccagctccattttctttgtgttatggccaagaacacgtgtcccgtgctgcaggcggcacgctgcgcacccttaataaattacacggacttctctgctctctcgaatctggccgcaataatttgcacactcgccggcatcgtaaggaagcagttgtgaaaataaccgaatctcttacaatatgaacctgcaagttagaatcccctgtggctgaagtgcgagtcacctcgtcacgtgacaggtatccaagtgctgtcctcagaatgcatgcccagtgcttcaggaatgaaatgagcgcctaacaggatagccacagcctgtatttgaggtcccgctgtcctcttttttggatttggggtcataatataattattgtggttactaatatttaaggctatctgtattttttccttcatgacaaaaaagtttgtttcaaagcatatccgatgctgacatagtcctctgagtgatgttccttttcctgctgagtatgatgaagagacaatgatctatgctttccccacaccaaagctctgagacactctacctaagaggccccagggataaagaagagcaataaggaagattcccctgccctctcctattttttgttcctacccaggtctgagattccccaccttagagacccttcgtgatatccaccttctgctaaggcaccaaacaacccttccagttcaaaggtgctcattggccaatcgctagctctcctcatcagaaaagacagttccaaaaccctcagaggctaagacagaggaggagagaattaacaagagttggtctctctgtttgggagaagaaagagttgaaggggaagtagaaaagtaagcatctgtccttcacacactgcaatcccagccttcctgagagacactggtaattgagtccacattccctctacagaatattgacaggtcccacagtccaggacacttcccctcaagcagagtcctgggcaacactaagtcccctccaaagccatctgagagccaccctctcccattctggcctccacagcctctgccccaactcctcaccattcactttgggtataaggaattggagttggggaaaacaagaagacaggatgcattttgaaagagaaacatctggaagttgcatccttcaggatgtatgcgtaatctatttaatacaacgctggctaagattagacttgggagggagataaggaggagtaggcatgctcagatcattgccaccagcagcagaacatccacataggagccaggagtcgcaaaccagcacggccttggatgcacggcctccatgcctgtttcaggcacagcaccggagtcatggaatgttaagggctggccaagacctcacgactcacattacagatgaggaaaacaagtttcattgtggggaagagacttgttgggcccatggcttgctagtgacacggcagggccatcaatgtctttttttgaaatagaaaattatatgcatatacgtcaatcatatgcaaatatatatgtgtccctccattttcatagcatggaaggcggcccctgggaaaattctagtgggaatgcttgtttttactagtacgtattttctggaaattctttgcttcctatggcactcctgtaagctaagttcttatatttttgtcagatcctgtgaggatcaaccccaggcattttcctaacaactccctccctgactttggcagggaggagacagaagagcctcccctcctccatgcccccattaccagcaccacctccattgctatccgtgtttagcccttgtttcttcctctctctggctgcacagccccctcactcatccctgcctacaagaaaactgaagggcaggcaccagctctgtgcctggtgactcaccatgcccggggggcagaggcagccagagacacagcccatgctcatgcactccaggtcatagttctggcacgttttggtacactcgagcccttcagcccgcaggttgtcagcgggacacaccagcttgaccatggggggccgacaggataggctccttttgcctcgaaggtaggaaaagcaaagagatgattagtgaaggagagaatggacctaccttccacactgtcctttggtcccctagagtctgtgactaaattcaagagactcagagttgcccactcacggggaccagcagctgcctgagccagggtccctgtgtgggactgggagggcatcttctcacctgggcttctgacctctggcttacattggtggcagctcttctgaccccagctctcatctaatgtcccatacttgtcatcacccttaaccttgctatagcaggttacattgaatcaggatgcattgcagaaatttccagacccaggcttgaaaagacctgagtttgggtgctaaaaaggagttttaatggacccaacagaatcattcctaaatggttacaactaatgtggggagagaaggccatctgaccacaatggctttaaaagagatctctgctcgcgtcagcccctgcccagccactccatgcgaatttgcaacacccgcaacactccatccctggacactccaatctcccctccctgctgcttcccctctgatatcctatatatgttcttctcaccatctgatatactacacatctcacttacttgtttactgtcctccccaagccactgggcccactagaacgcatgttccatgaagccagggatttctatctactttgcgcattgacatatcctacttcgtggcaattagtaggtatcaatggctaattgggtaatactgacagcagatgactgatacagcacctttctttccaaagcccaggtgcacttaatagcatttgtatcacatactcgctcctctgggcaaaacagtcaaaatttctagccttatttttatatggaaactcttgttagaaaactgaaactccaaaaggctaaacggcttttcccaatctgcacagaatcccaggagtttcctgactttgaaaaatattacattttccagtgaccagactagaagattctgagcagaagcacggaaggtaggtctgagaggcagaatgcaacagagagtgggtgtggggaaaactctctgagagggacagaagaagacacagaaggatggagtgatcttgaggtcacaagttctggtctcaacctttgagccacccatgccctcgggatcttgccccagctctaggctgagagacgctctccagtcggtcacgccaggagccagacctgtcacgcagggcaagccaggaagcaaacaccatggcacagaactgggtcccttggacagaaggagccttgtggaaagtgagaggcagagagggaagcagtcaagctggagattgaagatagccatttatctctctcccactggaagagtcctttctaagcaaggataagccttctggaagcaaataagggtgctgcaatccataaatgtaaatgtgaaacccccagtaccaggtcagccccttctcccttccatgcctggtccttaaacagtacaacaggccaggcgtggtggctcatgcctgtaatcccagcactttgggaggccgaggcaggcagatcacttgaggtcaggagttcaagaccagcctggccaacatggcaaaaccccgtctctactaaaaatacaaaaaattagccaggtgtggtggcgcatgcctgtaattccagctacttgggaggctgaggcacgagaattgcttgaacccaggaggcagaggttgcagtgagctgagattgcaccactgcactccaacctgggtgacagagtgagactctcaaaaaaaaaagacagtgcagccaccgttaggaccttcgaatggagagcaacggacccaacccttctctttctctctttcaaacccatccaagaagctttctcaaggaagagctgtcttcatcagcatgtccataggaaacaagaggccatcaaagaagggtgactgtcatcacaatcaaggccaccaactcacagctatccactgggttaaggtctccacgggcaaaataggggtctcatagaatttatctgcaggtctttccccttacacgaaatcaaatactccttgcctcaatggtcgggattgacacatgcaaagacatgccttggcctgaaagtcactcacacaaacccagaaatgaaggcgatcctgggcgaagccagacccatgcctgggtgcacacgcacatctgacggtgtcacccagctctctcccgccattccacacgtgaggaatctgggcaggatggagtcaatgggccttccagggggacagtactcactgcgatgagacaggggactgctgaggacagcgtcaggcagcaagcttccggggactccactcatggtacagtgcatgaagccatcctcacagtagctgcagagaagaaaatcatagccgagcttcacgagactcgtctatactcgctgcctccacatcttcacctcccactcactctctgccccttccaaccaggtcccagtcccataacccctcctgaagcacagcttgctaacgttaccaatggatgatccccacgtcactaaatcccatgggacttttttcagttatttgcttaattgatcccattcaacattattcatcactgttgaacactccactcttctagaaaaaaaatatttctctctccaggttttcctcccacttccttggttcctccttctcagcctcagctttcatgtgcccccactgcctggcctttcaatatcggccttccccaggctctgtcctaggctcgctcctcttctcacactctgctgccatccccagttccaatcacagacatgactcataaatctacatcagcagctcggaccgctcctttgaaccccagacccatatactcaaacgcctacatggtctcactaatgtagtgagtctcaaacacacctcaaactcagtatattcaaaactaaactcatgatcccccgaccaaagccaattctcctccagggctgattcactgaatggtgacgccatccatctggcttcgcaaccagaaacccaagatcatccctgccactgtcttctccctcatcctctgtatctgattcatcatcaagcccttggacttggcctccaacataccactgaaattcatatccactttatctccactgtcatgagacaagacactatgacctcttgcctggactatgtaaaagtctcctaactgactgcatatttttataaaacgtctgtggttgctttgtatgtatgtttagtttgtataaatgatatcacatagcatgctgtgttttgcttttcccatcgagcaccgtgtttgtaagattcatccctgtgaagacacggaccacttgtctgtgacttctgttgcacaatacaccttttacccactcagtgtcccagtgattgacataggttgtcacctgctccttaccaccacaaacaaagctgtgctgaacatctgcagacatgtgtcctaatgaatgtgtataaggattttagtctatctgcacagaggcagaagggcggggatagcaggtgtgaatacctgacctgcacatgatgtgccaagtactctcctagatgactcaaccagtctatgccttacaaaagcagatgaggcccccatgcccctcagctctgcattatccagatgtctaatttttccagtctagtatgaagtcatactcattgctttaatttgcatttctcagactgtaataattttattcagttttgttttgctttgttttgtttggagaccaagtctcactctgtcaccaggctggagtgcagtggttcgatctcggctcactgcaacctcctactccctggttcaagcgattctcctgcctcagcctcccgagtagctgggattacaggcatgtgccaccacacccagctaatttttgtatttttagtagagacggggtttccccatgttggccaggatgatctcgatctcctgaccttgtgatctacccgcctcagcctcctacagtgctgggattacaggcgtgagccaacgtgccctgcctgtttttgtttttttgagacagagtcttactctgtcgcccaggctggagtgcagcggcatgatctcagctcactgcaacctccacttcccgggttcaagcaattctccggcctcagcctccagagtagctgggattacaggcacacatcaccatgcccagctaatttttgtatgtttagtggagacagggtttcaccatgttgaccaggctggtctcaaactcctgacctcaagtgatccgcccacctcggcctcccaaagtgctgggattacaggcgtgagccaccttgcccagctgactgtaatgattttgaacatttttaatgcagctgctgttcaataaatatctgttgaataaacaagagaatcagcccttccctttctgagcacgtgcagaacccgtgccttcttctggtttttaactaatacctagttttaagggagaaaattccacccgcccccgtaaatgtcatgttcaatctgtcatttggacatgacccaaaagcttaattttctaaaaagcctcaaagataggtttaaaatcaactcctggccctgagcctggtctgcagaagaagaaatactccattgtgatggccgctgggatgaccaagcacgcggtctgcagaacctccaggccacagcatttcaccctcctgccaccttttcacgaccaccactagcacctgctccagcgaggctcattctccagtgtgttgtctaaagaataaaaataaacagcggcacacaggccccgaggtccttccaacacaccttctccgtgaaacccaattttctaaatgaagtggaaagacaagctgctgaatagctttcagccctggtgcctaaaagagagacaaggaggacgcagacatggagaggtcgctgatgtcaaaccctaaaaagagcccaaagccagggtcactccccaaccctgttcacccaggggccaaggcgcaccttctcccaccttctctgttttagtgaaatagccagcaacagttgctgccctcccaagtcataccaacttcctatagtctagcctctatccttaccactgaaacacagaggccaccatgaccttctgatccccaaattcaaccgtctattctcactgtaataaggagagttcaagaatccctgggctctagtcacttgctggctgatttaggaaagtgatagtctctctaagcctcaaattctttactaaaaaagcaagtcatgcctgcccaacagtgttgttttaaggtcccagagagaaactcctggcaaactatagccagacaactgtagtaaaacagcactgggctaaggccaagtcagcagtcctgcagaggaggtccttactcccttctgcccttcatttccatgatatggcactgctctggttctgccctttttactggcctttgacctttggcctctctcatgcaatcctctttttcttcctcttgccctctgaacattcccccaagttctgactcagtcctcttttctgccctctggcccactccccttagggatcctcgctactctcatggctgaaactgtcacctccatgtacgtctttctctccaccccaacctctcactcaccttccagacccatttcaagctgttgattccatttgttcaccaagatggtaactcaaagtcattaaggccaaaaccaaagccatcacttgccctctacctccagagggccctcttgctgttcttgcgtcactgtcctcacaggcattcaagttcagaactccagggccatctgcaacagcccctcctcctctcaaacatcccactagtccatctgctttcccagcgtctctggcttctggcttccactctccatttctactgctatcgcttgatccaaggcctcgctaccttcttatcggtcaacgtcaacattttcctgcagatgctctccctgccatcatacctcatgcagctcccaaaacccaccccctgaagttactcttggatcctatttgctccctgctaagaaccttccaggggccccattcctactgctccagcatcagtgctcaccccctcacttctgaagacccctgaacctcatcccaacttccctccagtcttagtcttccttcatatagcatgcgttcatgccagaggacttaccttggggattgtggagtacaccttgtgcgtttagtccctagacttctgctccacctcaaaacaatcctccaggctgggcgtggtggctcatgcctataatcccagcactctgggaggccgaggcgggcagatcatttgaggtcaggagttcgagaccagcctgacatggcgaaaccccgtctctactaaaatacaaaaattagcggggcgtggtggcaggtgcctgtaatcccagctactcgggaggatgaggcaagagaatcgcttgaaccccagaggtggaggttgcagcgagccgagattgtgccactgcactccagcctgggcaacaagagcaaaattcagtctcaaaaaaaaaaaaaagaagtgaacatggattgaatgttagacgttattaaggaattattgttcatgttcaggttaataatggtacctttacttttttaatcgtttatttattgaaatacatactgaagtgtttgcaggtgaaatgatgtaatatttacagcttttttaaaaaactattccagccacacagcagaggagtcaatagacaaaataagaatggtaaagtgctgataatcattgaagctgggaatggatacgttggggctccttatactattctctctactttaatgtctgtctgaaattttccataatcaggacttctttttttctttttttttttttttttttttttgagatagagtctcgctctgtcacccaggctggagtgcagtggcaagatctcagctcactgcaacctccgcctcctgggttcaagcaattctcctgcctcagcctcccaaatagctgggactacaggcacccgctaccacacccagctaattttttgtattttcaccgtgttagccaggatggtctcgatctactgacctcgtgatccgcccacctcggcctccctaagtgttgggattacaggcgtgagccactgtgcctggccaatcaggatgtttctaactggtcttccctagtagactatcaggtactgtgtctggtgactggatttccctctgtcgcccgggctagaatgcagtggcgcgatcacagttcactgcagccttggcttcctgggctcaagcaatcttcccacctcagtatttcaagtggctgggtctacaggtatgcaccaccatggccaactatttttttttctttgtatttagggacagggcctcactatgttgcccaggctgctctcaaactcccaggctcaagcattcctcccacttccacctcccaaagtgctggggattacagatgtgagccactgccccagcctggctcatctttagaccaccaattcttagccagaactaagacagaacaggtgacaggtaagtgtttgctcaacaaatgtcctgttgtaaatttcttccacgctcatggcaaccctgttgaaaccgactgtcacagaaggcctaggcaaagagctgcaggaagcaagcatgatttggagctattttggggaagtgcatgaagcaggtcagggtagcaatgccccatggaggcagcgctgcagtggtccatgttcttcctgctcaaatgcttcagcttgagaatactgaaagcaggctggaaaggagggtgacaggcagatctcccttttcctgttccagaaaaggaaaactgagacctaaagcccagaaatgggggccaacacataacagttggcaataaaactcaagaactcctactgccagccaggaatcccagttccctgtgtagtaaggaagtcagaagacctggaccaaatcccagctccgcttctgacttgctgtacagttctggacaagtcacttccttccttgggccccagtttacccatccatgaagtaaaggacttgggggtcccgttttcctccccagctctgctgttttagaggtccctgacactgctgcctgcacttaccacatggtgtgatggtctgagaagatgtcttctggctggaagatctcaccgtcatagtaacaggggcactgggccttgggcacgcagtcccccctctcatccatgtagagccctggggggcagaagcagccctccaggcaggcctcattgcattcctcatccgggtaagagagagagcggcaggtcaggttgcagggggtcccgcactgcaggtacacctggcctttcgggcagttcagctctagaagagagaggagaagtaaggcctcagcgggaatgttggacagcaaggactgtggttctaggacttgccaccccttgtagctgtgacccccaattatttaattaaaatttttattgagataattgtagacttgcttgcaattacaagaagtaatgcagaaagatcccatgtaccctttacccagttttccccaagtgacccccaattatatctgtatggtcatcaacttcctttcccactatgagcaaatgtgtatttttcagcatgcagatatgtattataattatgggggcacacattttctcctttcctcaaccacagggaatgtgcattagtcatctctgaattctcaaagcctaggatgtagtagaaatcctggcaggttttgaagctgtgaatattaaaaagtactgggaatgacgggcaagggcataccccgtgacaacaatgagtaccatttatggagcacctactgaatgccttgctcttacgtgggctctatgcctcatgccgagttagctctcatcaccccctttcaagaaacttaggctgagtgacttgttaggggtatacctcacaggaagaagcagaggaaggatttgaactcagctctctgcagccctaaagctcatgctcataacccttactctctagaaagaaaacagtccctttgaggacatgctggtcccaaagaggagggacactcatgcctaccacagcgaaatgggctgcacccatctgcccacagccctcaccctccctagcctcccacagaaaaatactgcaagagacacaagccagaaggaagtgtagcaaagtggcaacgcagctaagggaacgggctctgtatcccaaatacctgggttcacgcccaggtccaccactagctggctgtgtgatcttgggcagtatcctcactggatggaataacagtatccacccagtctttgtgaaggttgaatgagctaacacatttagaagaatgtctggcatgtggagaatgttcactgctaataatgttcactgataataattattattcttattgctaaggaaacagccccagctcagcggtcccaagaaggaaggagtgttccagagaaaggcctaggcctcagaagctctggcattctggtgacaaaattccttatgggcagggtagaggacagggaaggtgtggggagcattctgccctttcaaaatgccttccctgtgcagaccagctgctgcccaagaaatgagaacctcaccctgggcatgcttcttctgagaccatcacaatccttcccctctctgttcaaatccattgctccagcagaaacctactggcagggcatttcacagatgttataaaagtaagccttggccgtgagcctgaacaatggagtggggagcctctggagagaccctgcagcctcccgctcctacaaccaccctgaacttggtgtttgaaggtagctgggaagggagggcctctttaatcctattagacattgatttttctctgcaagaatggaaaggttggattattggatgaatactgagggagtgtaggttaagacaggatgtgttagacaataaagatggagatgtctttcaaccacctgagcctacaatgacaagggcacattttacccattaaaaagcagctagacttgagaactttctttgttctgataggctatctctagggctggcttggagccttattaaatttctcctttagccttcttccccaaagaaacaatgcacatctcagtttagcagacacttcttgtgtatccactgcatgccaggggctatgctaggcccagggaggcagagatggccagccctggtccttgccttcagaaagcctgtggtcctgtcttcccaaagggagcacaaccaatttgcaagaggaaaaaaaatgtgtgtgcttctcatcaatctcctcacaccatcccacaaagtagctacatggtaagtctgtgctccctgagtgtctccaattgatgtgacctcttcttacgaatagattcactggtttagggagctctgttcatttctctggaagagaaagtggaagtgggtagaggggacagctgagcctgagctcttctccaagtcaagaaaagattggggcaagaacccaggagacttacccaactgccttgggtacaaagggacagcccaaggccatctggtcagcccagtctcttgtcacataaacccacagagacagacccctcttgtccttaacagtctccagggaaagctccttcctaccaccctttctaccctatcgtaatgcctcaggagtcaagacattctttaactgaatcttatccccactactgaagcatcagcccatttcccctgttctgttcagtggaggttaagaatggctgttcatgacagattaaagaatatttcagtgggcccttagcattccaggagaatgtcctaaattaagaaatcctgcggatgctgccacatactgataatgcatcatttctaacactggtggacaagcaaagaatattcacaagcagcatctcattcactcctcattactttccccaatttctaaatagcaaatgctaaggaagaaactgaagtgcaaaggggttacgtgaagggttcaaggtcccataactggtacctcacgggaaagttgccagtaaggacccagacccagttgtcccagcccctagcctgtggctccccaagacatcccagagctggaggaatggggagggcacaacggctgcattatgtgctcgtccctttcgtccttactgttgtctctgctcctctttcatatgacatttctacaactcaaaacatgagttggctcattggacccaaaatagtagcacttctagggtccccatgcctacactgctcctgaaatatagatgctaattcctttcactgtttctcataactcctcttccaacaggaccatctactttatatatatatatatgtatacacacacacacacacacacacacacacacacacacacacagggtctttctctgttggccaggtcagagtgcagtggtgcgatcataactcactgcagccttaaattcctagactcaagcaatcctcttgcctcaacctcccaagtagctgggactacacctacattttaatttctaaacacatctactttaccctaaaaaacagaatatccactatgccttattcttaacagaatatactcgtcacttctatgcctactatgattctaccattggaaacaagtcttctctgccaagaaagcagctttttaaaaccctagccaagtacacgtcctccagaaagccttccttggttttccctgccctgaatctactcatcctttcacttagtaggataggtatctagtagggcggccatttccatctgtgactctaacagtaagtttggagttccacatcatcactgttgcccgaccacactgggcatgcagcaaatgtccccagagcaataacaaaaacaaaaaagtgagcacaatagataccacctctggtgccaggaatccaacagtgcagagtgagaatctaaagccaactggggacagtgatgtaattcacctttaggtaactttatacaacgccagaggttttgtccatcggtggtttgcctggagttacaagcaaagggtttgtatgtgaatttcccttgccttcatcggactcttaagggaggcggagacccagtgggatctgggacccattcgctccacagcctgaccttctgtgctgaacgaacactaggtggcagcggccacgggaaacccaagctttgcagggacccccacgttctaggcctccaggtaggaggagccaacctgtcttcctggaacaggcccgaatcatcagccggtccccaccgcctgtcctgctgggaggtggaagggaaaagtgggtgcaaatgaaccgtcctccccacccgtgtttgtcacaatgccctacgccctctttccacaggaaacaacgcagagaaagggcttcgaaaagcacacgtggacggatttggggggcggcccggagggctgcgggcagggagggcacgcaccacagcggcctggctcgcgccacgcgacgcgcacgcctctccccgcgcaggccgcggcatagctggccagggcgccgcacaggcactcgcggccgtccgagcaggagcacacgtcgtagcggcagttccgcaggtagggcagcgggctgacggcacgatggcaggcctcgaatgtgggggacgtcaggaccgcgcacgcctcctcggagaacctggctgtggggcgagaggagcgagcctgggatgtggtggggaggagtgggggccacgccctcccggtcaacactcccctggaaatagcccagtgctgctaatagagggctgcaaggtcacgcagagaaatctgcaaatgccacccccacccccaagtccatttatcttacaatcatctaacgctgagtttgtaagctgctgctgcagtagactgggaaggtcgaaggacggggactatggaattttttttttttttttttggagagacacggtcttgctctgtcgcccgggctggagtgcagaaatgcgatcttggctcactgcggccttgccttcctgggttcatgcaaccgtcccacgtagctcccaagtagttgggattacaggcgcgccccaccacgcccggcaaatttattattattattattattattattattattattattattattattttaatagaaatgggggctccctacgttgcccagactggtctcgaactcctgccctcaagcgatcctcccgcctcggtagactttttttttttttttctttcccgggggttggcctgtggcgggcgcccaataaagggactttgaagagcaaatggcccagttcagatgatcaagtgctgacggtaaaaacaaagcccgacccctttcctcgctccccgcccccgccctccgcggtgggagcactgcctccggaacgcactgcactaatgtggagacctcgagattctgcgaggtccctgccttgcccccgggttcacatactcatgcgcgggttgagggcgcagggatcgctgtgctgcttctgcaggtcctggcagtccccgtgcagcttccaggcgttcccgaagtcctccacccggggctccgccagcccagagggggtaaggaagtcgtcgccctggttgccattgtaattcccacacaggccgcaggtcttcccggcatagacgggggacagctgcaggagagaccaggccactctggagccgctgccgcgaaagcagcggcatagttgtttagctaatgagatggttttaataaaaaaaaaaaagttccccgggtgaaacataaatatgaatgtaataaaaggcagctaagccctaggctgcaaaagggggggcgggggaaagtgaactgcagtgtaaatttaccagctccatccctgttcccaaatcatcagagccctgtactgccacaagagattttagaaattatcagatcatctaaggatggagaagggaggcccaaagaggcaaagtgacttgcctaaggtcagggaggtagtggcggagctagggtgagtaggcaggttgagcccagcccgaagcactctgccctctgtgccatccacaccagtgggcctgacccccccacccagagttacgtgcaaactcaaggcccctctatatagaaagacttcgcgttggtcactcggtgtgggcccagcaggctgccaggtgtggtccaagccctccgggagctcacggttaatgacaagaaacacctccccacaacctgctgcctgccactcaggccctgggcatcactgaagagaaagggccacgagccacagaagactctgagggtgatgatggataggagtaggagtctgcagaggctctgaggcagcctgccagggtgacagcagcaaagcagcggcacagttcaaactccaggccatgagcatgtggtttactgtccattctcagaactgaacaaagttctgagcccaaagtgcacattcgggaacaaccagcagagtggagcccgcccttcccccacacagctgggggcatctgctggtttctacggagaggaccccgatttgaaggtggagcgggggctgggacccaggagtcctgactccctctccgcatgtcattaccaaggtgggatgacctccctgcgttctgaatccctcaggggctagggtcagctcttagagccccttttcagcttccagctccaacctaacaaaatgcagggttaacaatccagtagaaggtcccaggcccatagaaatcgaacccaagtaaacactgttaagaaaggggacagagtaatgtttccttgtttgcttgacaaataccaaatgttgtcacattaggccttctcccacctccttatttaaaatttaaatccccccaatcctggcacatcctgcccctttctctgctttatttcccccaggatctatcactttccgatctataatataatttacttgtttgctttgtttattgtctgtctctctccattagaacttaagctaaatgaggcaaggatttttgtctgttttgtctcactgctgtaatctcagcatccagaatggtgcctgtcttagcccttccaggctgctataacaaaataccacagactgcgtggcttatagacaactgatattgattgcccacagttctggaatctgggaagtccaagatgaaggcatcagcagatttggtgtctggtgaggaccctgctttccggttcatagatggtgccttctagctgtgtcctcacatggtggaaggggctagcaagctctctgaggtcttttaaaagggcacaaatctcattcttcatcatctcccaaaggccccacctcgtaacaccatcaccttgggggttaggatttcaacatataaatttggggaggacacagacattcagtccacagcagtgccagcagacactcagtaagtgtttgttgaatgaatgaatcgttgaacaaatgaatgaataagtaagtgaatgactaggttctcctcctgatgtgctggaatgcaatgcccgcagtcagggcaccctgggcaaggcggcataactggtggtgcacctccactcccttcccgcctctcagcatcttttctctctcctttctcagagtttgatgctccccaaaggcgttttcattcacccccaccaagccagccatcactcccatgtcccactctaaaaccaggtcttctcccatccccttggcttgtctcggaggtcagctcggccagggttaggagagtgggggcgacacttagagactctcttagtgtcacttagcgacactcactatttgaaataaacctctggtcagtgacagttctgactaaatgaagcctgtgcaaggatcttttccacactgctatgcctaaggcagagctgggccctgcagggcagccagcagggcagggaagcagcacacagaggatgtgatttctgctggctggagccttgctgcctggaccgccagccccacggggacaaagcgtacataacacacccaggggaaggagaccggggggcccctagctgcacctcctcttgcaccgcctctgccccagctggcctccctccagctctcgcctccacacttccatccccaaaagccctggtgtcagtattctgaggctccccacctcctgccccaactcaaacaccccctttcctgcttcataataaaacccacaagatagtccctttccatgagccccaggaatctgtgtaaagaaaaagaaaaaagaaaaatatatataaaaagacagttctataggccatggggtcatctgaccctgtcctgaaccttggccaaggaaacgtcttcttgttagctaaactgacacaaacccaccccaaagataaccctacatcccctcccacagaaagaagttggcttctcttctcctcaggggagagacaaagaccaaagaaacctgaggggaggaagggcagctgcccaggatgagaagttacggccctgctgatcaaggggagaaagtgcatgggtggagagcaccctctctgtgaggtgggaagatgctgagaaagtggactggctggccgggcgtggtggctcatgcccgtaatcccagcactttgggaggctgaggagggtggatcatttgaggtcaggagttcaagaccagcctggccaacatggtgaaaccccatctctattaaaaatacaaaaattagctgggcatgatggtgggcacctgtaatctcagctactcgggaggttgaggcaggagaatcgcttcagcctggaaggcggaggttgtggtgagccaagatcgtgccactgccctccagcctgggcaacagagtgagaccctctctcaaaaaacaaaacaaacaaaaagaaagtgaactggctaacgtgaagcacccccttgaagaccggggtgcaggaggcaagactggtcaggaaccaggagacccgagttctggtccttgcccggtaactaaacgaccatgaggcctagggcaagttactcctgctccagaaataatggctctttatttcctactggaaaagggaggttgacaagaggatctcccagaccttcctgctttatggtctgtggttgcaggtttattttcataaaaggaaaaaaaaaaaaaaaaaggagttagtttgaaattccctcaggagctctaagacaggagaaagaacatagccacacgaggatggaggacgccaggatctcctgggtgaaacctgccaccctgcccctgccacccaggattatagcaaggaccctgtggaatacaggaccccaggaggcaggaggaggctctccagggatcccaggcataatctagcgcagtggttctcaaagtgtggtcttgagacccataggggtccctgagactttcaaggggtctgcgagaccaaaactactttcataatactatgaagacgctatttgccttttccctcctcattctcttacaagtatagagtggaattttccagaggccacatgacatgcaatattgcaaaagattgaatgcagcagtagatatgagaacccagctgtctcctattaagccagccattaaagaaatttgcagaaatgtgcagcagtggtattattcttgttgcttatttttgttctggcaaacagttacttttccccaaaacagtgatgtttatattaatgtgtagtgggtttattattataatttttgaatgagttaataaatacatattttaaatgtctctaatttaattttcaatctgataaataccaataaatataatcctcctacaagatcttgaggtcctcaataatttttaagagtgtaaaggcattcaagaccaaaaagcgagaaccactttttgttctgatgggaaaggcatgaggcagagaactaatcctcgctctgccatgacacggttggtgggggtcagagtgggatcagtcctctgatcagaggagtctatcctagccctggaagttctggagtgctgcaccatccctccacttcctgtgccctggttgcctcatttataaaatggcagtaatatttgcactgtccacctgccagggtcatttccagagaaacagtgaaaagtatggattgctatccagtgtgattccaggaccaccaagaacaagaggaagtggcccacacatgcagagtcccagtgtccaggggaagaatctggtggtttcctgagcaacctttcccgggcaggctttctcttagctgagagtgccaatctggctcttcccttactgcccacagtgggcacccagggagacacccctgctcccgggccttgtttcagccgggagattggacagcaaacctgctccttccccagccccacaagagcccaccccagtctagaggcccttgggatagcagagcccagcaggaagaatccccagggccaagaaggggcatccagaaaacaaacaccagcctcataaacaagagaggcctgtttctcgctctgggggtgtaggccatgaggagaaaggaattcttctcccaccacacaaagccattctacccagagcacaaggggtactttgtaagggtcgggccgcagggagccagtaccccgtgagggcacctaccttcaccagcagcctcccgcggccatcccagtccatctgcaggtcctccccgtagctgaggcgcacggaggccgtcactgtatgctggatgcggaggtcacctggaacccagcaggacaggactcaggcagaggtggggagaggacagggtggtggcaggcagatgtatttgggaggaaatggggtgtctcaaaaggatggtagcactgaagagcaatgacttaggggcagatggggtggccatgaggtttaagggggtgtcaggaggaagggtgatcaaggtggacagagcgcaaatagggtcccccaggaagaagcctctgcaccccccgctatgacctgccattccccctactgccacaggagggaggcagaggctcctgcatcctgggctgtaggcaggtgccctggagcagagggggatctctttagcattgacaccacgacatctgaatgtgcctgggacactctgccactgcacaccacctcatgtctgagcgatgctgtgtacgacactgaatacagcaattgttgcttctgtgggaaggtggcgacagataggagcacaccccttgccctgggggaacaaacatatcttataaggagacacacagcataacacccatggacgtgctgggtacccactagcccaagttcatccgctgtgtgcaatgctaggataatgggcgacaaagtggccagcagttgtggagaagaaggaagagtctgagagccactttgagtgtgaagtttgggagctttaccatgcaaaagcaggtttgctttgaccggcacagtgcaacccaggtgaagatactggacaggtaggttttttgctacctctagacaggccagagggtcacctggcctcgccccaagtggcatcctctggtgtgacatcaccagccacccccgatctctcagcatcagcctctgcccctgtcccaccccagagcaaaccagaaccacctgcccaagactcaactcgcccctttggttcaagccaaataaaaatcctctcggttcccttttcccatctacactctgtcccaggtctagagcaacctcttcatctataggcttccttctctagtcttcctcctccaggaagccttcctttcttggagggatgcatgccaagcaccccaccctgccctccaaaaataactctccatcacattcccatggaagaggcatgcaggtccttaaggacagtggccagggttgagaaggagggtgctaagggatgggctgtgccagccccaggcctgatggagcaggacgaagcatacctttcaggagggggagctggacgtcctggccatccatggcaactcctgccccatgcttcagtttcacaaggctgttgtgcaggccaggcagccggacggtgacggagcgggtgcacacagcgtcgcggtcatcagcacactgccaagagggaacacagggtgactttgctgcaccccctgcctatccagctccccagcccaggaccctcttaatcagagaaaggcctcaacccgagagcctctggccttctcataacctacaactccattctcccagaatactccatgtgaatggggccccctagagttgtgcagcaagaaggcttgctaagtgcatccttgcacacgccttctcccagcctggcccagtctcttataaagaaccatgggcctctgcttcatcgtgttccttggacctactgttccaaagagaatcaaagactttgatcctcaaggaaagccctgtgcattctcttcgtcctcatctttgcttccatccctacagaaaggaagccacacatgtaccacagagttcagaagagaagaccagccctctttgcccccaccccagccatccccagctccaaacatcagagggttagttatgggggcaacaggctagacccaagcaggatgcgtccactgggtggggagctgagccagccctgaggaggcattattgtcagggcaggatgccttccgccagcatctagggagagaggggatgggctgggtttctggatgaatgaggagctaactgaagtctggaagagacctccctcatgcacagaaagcaatgccccacgccttccagggactgcccattcagcctagcagctatgcagcaccttgggctaccacccgaccagcagccgggctggcaaagctcacctggacagtctcaatgacaatggagaaggagtggtcctggcaatcccgggccagcaggtactggcagatcccactgaaggtgaagtatctgttgtcaaagctcttgaagtgtgattgacctgtgacaaggcactcccctggagagacacagaggaagggagaagaatgggaggtgagggcacttcccctggggtggccaaggtggaatgcatatgcaagcagggtgcccttccccaaaactgcatggacgtcctttgcccaaaccagtctaaaaacaagttctacgagaaaattcggttcctgctcctaaaactgcaagatgtcagagctgggtcattcaggtcaaggcctcattttacagatggggcaactaaggaaggtgacagagccacactcagtcagtggtggaaccacgcaggaacccacgctcctgcttccaggctccctgcagcctcccctcctccctcacagctcactgccatgtcccacgctacctgctggcatcagggccacaccagcctcagactggtgccagcggaatgcctggccagggggaggctgcccaatagcacagggttctctgaacctgagtgtggagaggctctgggaaacagtgtcacccctggagagtccctggaggccagggggcagagtaggcagcccagaggcaggatgaggtgggagggtgaggcaggacagtcttggagctcagcagtgaaaatggggactccatcctcctcaccagcagaggggcaactctaaggccattgctttctgcgtcctcagaggggcaagcccacgctgtgactccagccagggccaatggggaaccaggaggccatctgcccatgatctcaccaccacccaggcagtgctgacctcggcagcgccagcttcccagcccaggctgacacatctgtgggtggggactaggactccccttcatcaccctgcaacccaaagccctcagcttgtccccaccctaattcccacaccatctcccccacgccccagcctaggccccatacttgtggcccaatgcacctccaaactgagatcacacatcctggaaggtgtcctggcagggggaggcctctgccaatgtctccagtgattctccatcaacctgcctggcttgaggcaatcccatcttcagggccaaacatggacccatcaaagctgaaaagggcatctggatcccttcccaacctgccctatatatttcctccacctgctctcatctttgctatctactctacagaaaaagaaatatatatagagagagacaccattgccatttggtgaaggaggaagacttttcccacccagtcactctacggtgcatgtgtgagttcctttctctaaggatcaaagcaaagatgaggacacatagagtgcacagggcttcccctgagaccctccaaacagcggaagcttggctgtctacagcgctacctcagcctccacctgaagttccccctttggggaacagatgctagaccaacgttggaaagacaaatgtaagagggtcctacagaccatcctatgtgggcccagctccaggggctaatgctagccctgtcacacagccaaggggtccccaaaaggcacagagagattctagcttgtcaaggacaagctccacaggccctcactgtctggcacttcatgctcgcatgtgccctgacaggcccagccaggggccaggctagactgtgcagtactggacccaggtgtgggcctgcctttgagatgtgtatgaaggcaggattaaggatgaggtgcctcagggatgtacacatccctctgcctggtccccaggacagtggatcccttccaggacagcatgggtcaggagggcacatccagcccagaggaaattaggagaaagtggaaaggccccagatcactcccatcagcatggcccaccttctccgctgccccctctagaagagcgggagtgaggagtgactgttcgtggaggacagagcaggccacaagataggggccaggatcgtcccagcccattctggatgtgctgtaatttcaagtccagtgaggtctcaggaaagcctttttgaactgaccatttttcagaaattatcatcattctacaaacacagtaatatggtcatttgtgtcaaatgtcttgaccccagggcagtaaaaatgggtgggaattcttccccctgcctttctgtgttttctcagagcactcttatctaagcaagaaaatggacttctgtcttctttaacaatacccaggaaaagaagggtcaacgagaaatgtgcaaatattcgaaaggaaaactttcagggccagcatctaatcgtctcatctgatttccttctctgaccttcactgacttgtgttcccaagtttctcgcaaatcagaagtctaaatattatatgagcttatctcctcggtacaactgagcaacagagccacaaacacaggaaaatgggtgggtgagctgccaggtagccgttagccacgggagctagaacgtcagccagaactatgggccatgcgaacacgctcacccatcctccacccaggatgggacactaggatattccccatcagtcagcaacaggcagctcctgacgaacagcgggcccaccactagatggagatgggcactggaagtttggggaatgaatgaaaggcaggtgattcctaaaactgcatttaaaaaaaaaagagcatccaggccgggccgtcatggctcatgcctataatcccagcactttgggaggctgagacaggcggagcacccaaggtcaggagttcgagaccagcctggccaacatggtgaaaccccgtctctactaaaaatacaaaaaattagccgggtgtggtggcaggtgcctgtaatcccagctactcgggaggctgaggcaggagaattgcttgaacccaggaggcagaggttgcagtgagctgagatcacgccactgcaccccagcctgggcgactgagtgaaactctgtctcaaaaaaaaaaaaaaaaaaaaatccagaagttaaagcagatccatttctatgtgaataaagatcctgcctcatgaaaaaaaacaaaacggaacctctcacctaatggaagcacattacctcttctaaacaaaccctttggtttgcagtagtgagccctggacgcggctgccctgctccagaccatttgtttccccagccccacaaccctctacctcccaaagccttccctgcagaaatgcccaacccacaggcctttagcaaagcaactcagacttccaccagatgcaaattgtcaccaaagcctgcaacataatctctaccaaatgtgcaagatgcatttctttttttttttcctgagacagtctcgctctgttgcccggcgtggagtgcagtggcgccatctcggctcactgaagactctatctccggggctctcacaattctcctgcctcagcttcccgagtagctgagattacaggcatgtgccaccatgcccagctaatttctgtgggttttttgtttttgtttttgtttttagtatagacagggtttcaccattggccaggttggtctcaaactcctgacctcaaatgatccacctgccttggcctcccaaagtgctgggattacaggcatgagctgccgcgcctggcccaagatgcatttttttttctttttcttccttttttttttttttttgcgtgtgtgtgtgtgtgtgtgtgtgtgtgtgtgtatgtgtgtgtgataggatctctgtcacccagcaggctggagtgcagtgatgccatcacagctcactgcagccttaatctcccaggctcaagcgatccccccatctcagcctcccaagtacctgggactacaggcacacaccactatgcctggctaatgtttgtattttttgtagccatggggtttcaccatgttgcccaggctggtctccaacccctgggctcaagcgctctgcccactgagcctcccaaaaagctgggattacaggcgtgagccaccatgcctggcataagatacatttccaagtgctccatggaaaccatctcattgattgctcctatgaagtgctcattattatccccagtttacagatgaggaaactgaagcatagagaagttcaactcatccaagttcccaaagaaactgaacagggatctgaatacgggcaggtctgtccagctgcagagcccagagcccttgatgccacctaaaactgcctcccgggttggctcctaccatttctcacatggctgatgtcattctaatcctcctccaggggctgcagagaagctccggcctgctcctcactttacaagcagagccaagcatatcccctccagaaccataccgcctattcttcccatcagaagctctatctgcagtcatcacactgggagcatcagacagccccactgcctgctgagtcatggcagggtgtggaaatatgcttgtgtgcgtgggtgcaaatggaccgggaggcgatgatcaacaaaactcccaaactagaaaaagatggtcagagccagggctttgagaatgcagagaagagcgtagtggttttgttggcaaaatatcaaaccacttagtagacagaattgacactgtttatcttttcatcaagacatcaagagaatgtcttacatcctcagcaaagtcatcttctagattttgaattgaagaccagaggactgtattgtctgccccagaaaacagtccatcatgtacatagttggtgttcaaatagtacttggatgaatggacagttggaaggatgatggacggaagattcaccctatagtaagtacttgttaaaacttcctaatctggtggttacaaacgtctaaaaaaacacacacaataaactgaattcctaattccatccactgtggctcacagatctcatacaatgagtgcttattatttaaatgttaaaagtgttttcacaggttaattgcagcaactcatatgtcttccaaagagctcctttagtcttggacatggtgtaattacgttcagtggagcacagatatccctttcaagagcaatcttttctccttcgtgccttctttaagggttacacaaaagataacctggctgggtgaccatctctttgcaagactaactgatctagcccacatctagttccagaattttcccagtgtagaggacactggatgaggtcctgagtcatcctaaagtctttaactcacagaccctaaatacagtcccaggtatccaagctcaacccacttcaggccaccaaaggttagtactgggaaggagaagaaagggaagggaaaaagtaagaagtcaggcagttgtgagttcaagccctggctctgcctcgtagcagctgtgtgactttgggcaagtcatttaacctctctaggtctgtttctgctttcctaaaatgagaataaattgcacctgcctcacaggttgtaaccggaaagtgtttagcacagtggccagcacatagaaaacaccacgtgagtgagcacagagggcaaggtctgaggtcattggaaggtggggcagaagggagctttgaatgggcaaggtttgcagtaaatagaatagagttggggccaaacagaggagaaagcaaatggcagagattgctcaataatttttcctaagcagattttccagggcagggacaggatgggaggaatcatttggtgacctggttttccgagctcttggaccacgccatggtcttcatattaggcattctggaaagttccattagaactgtcccttcaagcctaaagaattaccaggcccttctacctcttaattttccaaagaatgtgtatcctctttgtttagtcaatcatgaccatacaggccttacagctcatcaaccttaatcctttcagcaaacaggtaataaggacagacaataacatctgaacgcaggtgcattctccgctttcagctgttgcagggctcccacctctggcctgtgaatgggttagcatagctggtacctgaaaccagagctggggtcacgtggttgcagccaacctgtgcagagagggcaacttctcgctgccttgagttgtggccctccctgtctggtaagagaggaggagacgcctccccgattcagggaaggaggaagagaatgagcggcaggtcgcctacctggacattcttcattgctgcagatccactggctgtttcggcaaatgctgttggagggaaaaagcacaggtcattggtggttctgcaaacacaagggtatgcaaatggatttagagctcatggtagttatcacagtccccaaacgaagggatgtgggaaaagaaaagagctggtgctagcagaatcttcatagggttaaaattgtacaggacagagctttggccacaaaggaatcttagagatattacccaggggaagaaaccccaacagagaaaaagaagaaagaaaaaaaaactacctgatccccctgaaaatctactcagataccaagaagtcaaattcctaccccacacacagtgagtggcagagagcaagagagcgatatggaaatgggtagctcccagcccagaagtgtggtgggcggtggccgactgagaacctgggggctcagtgcacacagaaggctgctaagatagcaaagggaggaggcctggggaccaaacgagttgtccctgctgtgcaggagactggcaaagccagccagaggtgacatccaggggtgcttcttgagatgacagaagccaggctgggcctggcctactgcagggaccaagggagggcagactggtgtgagtttccactggccactgcaacttcctaccacctagcagatgagagatttcaaggagagaaggacctacgtactgcttagtgatacagccctcctccagggggaaaggatcatttatgaaagcatagtttggagggacagctagagatgatgtctgcacgtgaaggatcctgcccttcctgacctccccatcttcaaggcttatttatctgtaatatactctttgctccccatcattgcctgccacacctgtccctagcccccaccagtagcctccaactcagtctcttctttcttggcacggtccaggttcttttccacctgccaccacccctgctgacccagcttccctccccagtcccccaggcaggtctcccagagcacgctgcgcagcccccattaccaggtgttgcagtctcgagagagggaggtgccgggagggtagcgctttccggaatgcacgcagggacactcggtgctctccacgcagaggccttcatccaggagctgtccctctggggtcaagggcatcaagacaaaggcctcaacattgtcattgcgtcactcatcccacaactatagaatccccagggacaatggttgggtttcttccaggaagctcaaagaacttgttctgtggtgtttatctttcacataatgcaatataaggaagggaaattcctcatctccattactacagatgaagacatgagcaaaagaattttgttccaggtcatccagtaggggaggcacaagtctgggcttagggcttcttccaggaagctcaagaatgtgtgtgctgcttcccttacacattaatgcaacgtgagagggagaagactactcattaccattccacagatgaagggagtcaagagttttgttcaagttcttccagtagagaagtcatgagttgaaacacacaggactcactctcaataacttttttttttttttgagaccgagtctcgttctgtcacccaggatggagtgcagtggtgcgatctcggttcactgcaacttccgccgcctgggttcaagtgattctcctgcctcagtttcccaagtagctgggattataggtgtgcaccaccacccccagctaatttttgtatttttagtggagacgggatttcaccaggttggccaggctggtctcaaactcctgaactcaagtgatccgcccatctcggcttccaaaagtgctgggattacaggcatgagccaccgcacccagccttgctctcagtaattaaacaggggttttccccaaagcccaccaagcctcccctgaaaagactttctagtgcagagccctttttcagctgagctcacatgacaaacccaggagatctttttcccagatcggttccctgacacacctaattgagaaaacagctcagctcagatgggccacgagttccccaaacaaagttactgttggggcccaggccaccctccaatttccctcaacacaagtgcgttcatggatacagtacaacaggacaacgtacattaaaaataaagaccagctcaatcctgatcacgctggacaaagacatttaaaaacttaataaaaggcttctgatttcagcaacggggagcaaacacaagtggccttcatctcacttcccaaagccaagggtgctggcaaggtctctgatctgtaaataaagtgggaagttcattaccagggcagctgcagccatccacgcatcgctcctgacacatttcattgatgtgcaggctctggcaggtcctggcgcaaggggacacacactgcctatactccataccagcagggcacactgggcctgaaaaggaacatcaaaggggtctacccagggcaggtcccaccggtgcatcatctcaccagccatgccacagcctgagcctctcgtgcccactctgactgctcccctctgtcttcaggcttccaggtccttctcacccccagtgagccacgtgcccccctgaggccacccctcccttagatgaacatcttccatcttgtgaggcccttaccaagacccatcgggggcacccaggacccccacccttccccttggtcgcctgctctccatgtataacttggcattctttcctccccttcacctaaaaccctttcagagtgacaccaaactcctctaggctcaaaacaagtggagtcctacgacaaagcaaggagccatggtgccctccatcccatccctcctccttttccccatgaaattggccccaatcaaatgccccacccagcacagggcacatttgcctgcatggtgacactcattccatatttatttccactctgccacaaggctgccttcacagatatcacctaagcactctctgttcttcccaatggaaccagctcctcactgcaaggacaggctctcctccttcctctctctaccctgtagctgagcgacattcaggctgactgaaagaccgaaacacataagcactcttttctgggctttctgacaccaaactattgccccttaacccttctccaagatacatcaggttatctcccctaccctacattcacagacctaaaaaaaaaaaaaaaaaaaaaaacagccactcggctttacagagaagaaaccagctgctagcatcctccttcctcacacccccaccacaggcagaaagtttgaattcagcagctatttgccacacactgagacacacgtgtgcagtgtaaagatgtggccggctcagctcatctgtggaaccatcacagactgcttatccgtctgcatggcttttaatcactggaagggctggggaaagaggagacttcttgcaaggtgacctcagaagtccccacttaatcctgataatttggggacagtgaccataactaggcacccattgagactggaagatgaaacacacagcacgagtaaggcaggagggatagcggtcattagcctggaggagagagatttaataaaagagaagaacttaatgaatgctttctgctctctcaaagatcaccacacacggacagccaggtcagcgtcctgctcctcatcaattcgggcgggcaggcggtgaagacaaaaaccaaaaccgcaactgccaagatcttggtgggaagcagagaacactgtgtgagtgcaggggtcggatttcctgagggaagtcagggggcgccaggggaggcgtgggggcgggacggaggcaggggcaggacacggggctttgggaagcccgtttgacagagggcaggagccattcaggaaatgggtccgggacacgtggctttgtagtcactggctggctgggtgtggtaaagccgcacatacgtgacacagccccgaagcaccctaagggacaccacccaggacagaccgttcatccccggcagggcaggacggggcagggggccgacttactgcacgcgctgtggtcggtccagccgtacagcaccattccctcctgggcacaggtccgggcgtactccaggagggcagggcaggcgcactccagccccccagcacactcacacaaagtcttctcacacagggccacaaaaggctcggggtccaccagagggtggcagcgggcaaacaccgaggtgctcttcagaagctggcactgctcccacaggccctgcaggaagaggggccgcctcagcggtatgctccgttagtgtctccctgagtgtggcactgagacttagccctgctagggaaaccaaggcagctccctcagcacctgggacaggctggcaccaagcacatgcatgtgttcaatgcaccagcccatcgaccaaggaaaagatgctggacccgtgcaatgtgaagtagaccaaggctaaggttacatcctagactgagtcctggaaatgcagagtccaaggccctggattgccatggtgggcagtgtcctaggaacggacagaggatggagagaagcacaaagagcatgcgccctggagttggcctgggtggctgcagagtccaggaatgctgtcagcatcggttctgcactgacctgttcagctcccctccctgaccttgatcttcttcactatgaatgagggggatgggacaaggggctttatagagatttctgggtctcaccctaggagatctgaatgcagtagtttgggatggggatcagcaagatttttttttttttaaacactccccaggtgattgctggggccagacgggaccagttcccatcagcaacagcatgcgctgattctgtggaatgtcccagacacactgcagcaagcacgagtattcttggttctaccactttgctgatgccctcaacctgataacacaggcagctttggaattgtcatcatttcctacttctgctcactcacgagtatcaacgaccctacgttttacctagaaacatctctccattctgtatgttaatgactctaaatacacctttttcccacagtgtaacatctctgaagttggattgcgtcttaggatggctatcatatttgaattggtaggcttttgtttctgagcgatacacagaacaatggtgtgtcttagaatccatgatgtctttcttagctttggcacaacacagagtcatggatatatatgatccccatgatttctttcttgcataacttcttggatgcataatgcaatactctctgactgacaaagctgcaagttcatgaaaaaacttatgatcttcagctaaaaagaaaaaagtgcaagaatatctcaatggaaggactgggtcctgaagggtaaactggagccagttggtatttgggaaaggggacagcaaaaaagaggaaagaaacgacccgttttgaggagagggaaattcaatcagcttgaattgtaccaagggtctccagagcaagcctgtataaatctacagtcggggccaggggccaggcctgtgggcctcctgttttgcggcgccacagaaagcccacaggaatagaaacctgaccccatctgctcaccgttctcgaaatccagtccggcagcacagggacgttggtcctaaggaaatcagtgttctagccccaatgcctggtgctagggccctgccgcttgctaggcctccacccacttcaccatcaaagccaagcaggcaggcctggaaaagatgcccacacttgtaatcccagcactttgggaggccaagtcgggcggatcacttgagatcaggaatttgaaaccagcctggccaatatggtgagaccccatctctactgaaaatataaaacttagtggggcgtggtggcgcatgcttgtaatcccagctactcgggaggctggggcaagagaattgcttgaacggcggggcaggggtggaggttaaagtgagctgagattgtgccactgcacttcagcctgggtgacagagcgagaccctgtctcaaaaaacaagccgggttctctctgcaccttaggaaagcacccaccggcatgggctgctcaactgcagaagtgcagcaggtaggctcatggggacagccatcagctgctctgcgtctcggggccaacagcagcccctccacggccctgccttgcccaatccccttctgccgggcgggcacccacggcatggctatgacaagcctaggccttaaagcccagctctgccacttactggcggtggggacttaggcaaatcagctcacctggtcagagaagagtgtcccagagtgagaatgacctgtggaaatgaccagtcccagacggcctgttggggccacgtgaagatgccacaatgccagcaccacgtaggccagccatgaatgcaggccactgttgtgggtcccgggaccacttaggtctcaggtggttacatgcagccttccattggtcaccctgagcattttacacaaggggaacctgaggcttctgaaagcaatgacgagggagactgacagaggtgggcaggcctgccttggcctcatcatgacttccacagccccagattcagcccagcgtcttccccatgctagcgtgtgagctaagctgtttactcaacccctcctctgcaaaacaggggagaatagtaacagttcctctgggacaagactagtgaagactgaatggaatatgcacgcggaagacttaccttaataaatgatgacccctatcatcatcatcatcatcttcatcatctcctggcctccagagagatccctccggccactaggcttaccctctagaatagtgagcaggtccccagcaggacagaaggacacctttctccttttccccttatctccatcaccctgggctatactgagatgaatggttgccgagcattatcacttcctagtatcttgcgtgctccttagggaacagaggggctgcttgtattcatctttcatttgggaagttcacacttctccagaacaaagtgagtttctagtagcagggagggaacctctcttctttgcaataggcagaacttcccatcctcactgccaagttggggctcagggaaggagactgaggcctgtgtctttccctccattctgccatgctgcctaccccatcaaaaatgtcattcagagaattacgtcactgaactcagagtgcagatgagggtgtcccagagagggtcatgtgctcaggctattgtctagccttttccccacccacaatttgaaactagagaaaacctcaaaaatgcactccctggggttttcctggtcattgctatgactgctgccatcacctgggctgtagcagagtggctcggagcagtccctgcaccacaggactgattcctgcaggcacagggacaaggaaccagggattctcaccagcaggacacagtaccagccaagggaaagaagagacccaggaatccaggcaccctcccctctcagagccgtgaccagacagagcccagcatggcccatctccagcatttccaaatcactcttttcccactcagagggataatgggaacagtactccagcacatttcctgggaggtccctggaggcattaaatggcttatagaaagccttagcaagaagggtgtttctgatgatttgcctgcaggatgggagtggatttctgcagaaacagccacctcccttcttagaacaattcctttggcctccactgtacaaacttctgaaatctgcctagggtttctttcttagcagaaacaaaagataaagtctgtcctcccattttgtccttcagtcttcctctggtcaggcttggcctgaacttggtccacctgagtgggcacagctgagagccaggcaggacttgcagctggatccgcactcacctgcagccataccacatggcatgtttaggtggctatctctgctgctcccagcttccctgttctgccacaggtagccctgccagaccagaccaggtcctgagacaggacacagaaacaggtccaagggccaggcgcggtggctcacacctgtaatcccagcacttttggaggccaaggcgggcggatcaagaggtcaggagatcaagaccatcctggctaacacggtgaaaccccatctctactaaaaatacaaaaaaaaaattagccgggcatggtggcgggcacctgtagtcccagctattcgggaggctgaggcaggagaatggcatgaagccgggaggcaacgcttgcagtgagctgagatcgcaccactgcactctagcctgggcgacagagtgagactctgtctcgaaaaaaaaaaaaaaataggtccaaagaggagttggcgtcttgtactctcaggctcgtggcagagacactgggatgcaggtagtgaccaaaacattcactcaacaagcattagcagtgtggcctctgggtctccagcagggtgtccaagcccatataaaatgcaagtctaactatgtatgtcccaccctggctgacagggcaaagctctagctcattaggacacagcaaagccaggaagctcagccttcatgatctgaccccagcctggctctccagcctcaccctccctgctccccacctcacacactgtgccaggctcaaggaatgcaatagaaagcaaacagatccccctcataaagcccagcagggaaatctgccctctacccatcccatctgccctcctgcatttcccccttctttggcccccactaactcccaccccacacttcagatcaagagcctccttttccaggaaggcttctctgacaggtccttctccccactctgccgagttaggtgttctcacagccctctgggggcctctattcttgtactgaaatggtccatttctgtggccgtctcctccatttctc
